(19) United States
(12) Patent Application Publication
(10) Pub. No.: US 2024/0060087 A1
(43) Pub. Date: Feb. 22, 2024

(54) METHODS AND COMPOSITIONS FOR MODULATING THE INTERACTION BETWEEN ADENO-ASSOCIATED VIRUS (AAV) AND THE AAV RECEPTOR (AAVR) FOR ALTERED BIO-DISTRIBUTION OF AAV

(71) Applicants: MASSACHUSETTS EYE AND EAR INFIRMARY, Boston, MA (US); THE SCHEPENS EYE RESEARCH INSTITUTE, INC., Boston, MA (US)

(72) Inventors: Eric Zinn, Lynn, MA (US); Christopher Tipper, Cambridge, MA (US); Luk H. Vandenberghe, Weston, MA (US)

(21) Appl. No.: 18/271,250

(22) PCT Filed: Jan. 7, 2022
(86) PCT No.: PCT/US2022/011682

§ 371 Date: Jul. 7, 2023

Related U.S. Application Data
(60) Provisional application No. 63/135,307, filed on Jan. 8, 2021.

(51) Int. Cl. C12N 15/86; C07K 14/005

(52) U.S. Cl. CPC C12N 15/86; C07K 14/005; C12N 2750/14122; C12N 2750/14143; C12N 2750/14145

(57) ABSTRACT

This disclosure describes compositions and methods for altering the bio-distribution of adeno-associated viruses (AAVs) in subjects.

### CROSS-REFERENCE TO RELATED APPLICATIONS

[0001] This application claims the benefit of U.S. Provisional Patent Application No. 63/135,307 filed on Jan. 8, 2021, the entire contents of which are incorporated herein by reference.

### TECHNICAL FIELD

[0002] This disclosure generally relates to viruses, and, specifically, adeno-associated viruses (AAVs).

### BACKGROUND

[0003] The adeno-associated virus (AAV), when rendered replication-defective, can be used as a vector system for therapeutic gene transfer. AAV is composed of a protein shell called a capsid that encapsulates a single-stranded DNA. The minimal requirements for the DNA molecule to enable encapsulation are that the DNA must be single-stranded and it must include flanking inverted terminal repeats (ITRs) of AAV. The capsid structure is a large multi-protein assembly that forms a globular particle with 20 facets composed of three 60-protein monomers in the form of an icosahedral assembly. These monomers form the capsid proteins. There are three capsid proteins, VP1, VP2, and VP3, which have overlapping sequences. VP3 is the shortest protein and makes up the primary particle structure, i.e., the essential building block to form the icosahedral assembly. VP2 is a longer protein that wholly encompasses VP3 in its C-terminus and is extended on the N-terminus. Similarly, VP1 encompasses VP2 and VP3 at its C-terminus. While VP1 and VP2 are not required structurally to form the capsid, both are required for infectivity of AAV.

[0004] In general, the capsid is thought to be the primary determinant of infectivity and host-vector related properties such as adaptive immune responses, tropism, specificity, potency, and bio-distribution. Indeed, several of these properties are known to vary between natural and engineered AAV serotypes and variants. To date, however, there is no mechanistic understanding as to how these changes on the capsid functionally alter these properties, and therefore, there is no rational basis to engineer AAVs toward any level of control of these properties. For example, several therapeutic approaches use AAV via a systemic injection to target global musculature for neuromuscular disorders such as Duchenne Muscular Dystrophy (DMD). However, vectors used currently for these approaches such as AAV9 and rh74 all require high doses to ensure muscle targeting and the vector naturally homes to the liver as a primary target. However, liver tissue is not involved in DMD disease pathology.

[0005] In 2016, the research group of Jan Carette identified a protein called AAVR (also known as KIAA0319L) as an essential entry factor or receptor for many AAVs (Pillay et al., 2016, Nature, 530(7588):108-12). In 2019, two independent groups reported on the structural resolution on the parts of the AAV particle that interface with the AAVR receptor (referred to here as the AAVR footprint) (Meyer et al., 2019, Elife, 8 pii: e44707; Zhang et al., 2019, Nat. Microbiol., 4(4):675-682).

### SUMMARY

[0006] The present disclosure is based, at least in part, on the discovery that one can manipulate, interfere with, or disrupt binding of various AAV to certain specific amino acids at specific locations within the AAVR footprint to alter the bio-distribution of an AAV in a subject, e.g., by modulating, e.g., decreasing or increasing the AAV's transduction of liver cells, without completely inhibiting AAV binding to the liver cells or the ability of the AAV to transduce liver or other cells in a subject.

[0007] In one aspect, the disclosure provides methods of modulating the bio-distribution of an adeno-associated virus (AAV) to liver cells within a subject. Such methods include providing an unmodified AAV capsid protein in an AAV; and replacing at least one amino acid residue at one or more of positions Q263, S264, G265, A266, S267, N268, H271, N382, G383, S384, Q385, S446, R471, W502, T503, D528, D529, Q589, K706, or V708 in the capsid protein (numbered relative to the AAV2 capsid sequence (SEQ ID NO:1)) in the AAV with a different amino acid to modify binding between the AAV capsid protein and an AAV receptor (AAVR) on a liver cell in a manner sufficient to alter, but not completely inhibit, the AAV's ability to transduce the liver cell.

[0008] In some instances, the bio-distribution to or in the liver cell by the AAV is increased. In other instances, the bio-distribution to or in the liver cell by the AAV is decreased.

[0009] In some embodiments, replacing the at least one amino acid residue includes mutagenesis of a nucleic acid encoding the AAV capsid protein. In some instances, the replacing step results in a conservative amino acid substitution.

[0010] In another aspect, the disclosure provides methods of modulating the bio-distribution of an adeno-associated virus (AAV) to liver cells within a subject. Such methods include providing an unmodified AAV capsid protein in an AAV; and replacing at least one amino acid residue at one or more of positions S446, R471, or V708 in the capsid protein (numbered relative to the AAV2 capsid sequence (SEQ ID NO:1)) in the AAV with a different amino acid to modify binding between the AAV capsid protein and an AAV receptor (AAVR) on a liver cell in a manner sufficient to alter, but not completely inhibit, the AAV's ability to transduce the liver cell.

[0011] In some instances, the AAV's ability to transduce the liver cell is increased, while, in some instances, the AAV's ability to transduce the liver cell is decreased.

[0012] In some embodiments, the replaced amino acid residues are any one or more of S446N, S446R, R471A, R471S, V708T, or V708A (numbered relative to the AAV2 capsid sequence (SEQ ID NO:1)). In some embodiments, the replacing of the at least one amino acid residue comprises mutagenesis of a nucleic acid encoding the AAV capsid protein.

[0013] In still another aspect, the disclosure provides non-naturally occurring AAV capsid proteins that include an AAV capsid protein having an amino acid sequence that differs from a wild type, unmodified AAV capsid protein amino acid sequence in at least one amino acid residue at a position selected from the group consisting of position 446, 471, or 708 (numbered relative to the AAV2 capsid sequence (SEQ ID NO:1)), where the non-naturally occurring AAV capsid protein amino acid sequence provides an altered binding of the AAV capsid protein for a liver cell than does the wild type AAV sequence in a manner sufficient to alter, but not completely inhibit, the AAV's ability to transduce liver cells.

[0014] In some embodiments, the non-naturally occurring amino acid sequence comprises at least one of S446N, S446R, R471A, R471S, V708T, or V708A (numbered relative to the AAV2 capsid sequence (SEQ ID NO:1)).

[0015] In some instances, the binding of the non-naturally occurring AAV capsid protein for the liver is increased, e.g., when the AAV capsid includes an R at position 446, an A at position 471, or a Tat position 708 (numbered relative to AAV2 (SEQ ID NO:1)). In some instances, the binding of the non-naturally occurring AAV capsid protein for the liver is decreased, e.g., when the AAV capsid includes an S at position 446, an S at position 471, or an A at position 708 (numbered relative to AAV2 (SEQ ID NO:1)).

[0016] In yet another aspect, the disclosure provides methods of altering the liver targeting of an AAV in a subject. Such methods include administering an AAV that includes a non-naturally occurring AAV capsid protein as described herein to the subject. In some embodiments, the administration is intravenously. In some embodiments, the administration is repeated a plurality of times.

[0017] In one aspect, the present disclosure features methods of altering the bio-distribution of an adeno-associated virus (AAV) in a subject, the methods include modulating the affinity or avidity of an AAV to a liver cell by disrupting or interfering with binding of the AAV to an AAV receptor (AAVR) on a liver cell, wherein the disrupting or interfering involves at least one amino acid residue at one or more of positions 263-265, 267, 268, 271, 382-385, 446, 471, 502, 503, 528-529, 589, 706, and 708 (relative to the AAV2 capsid sequence (SEQ ID NO:1 (top sequence in FIG. 1))).

[0018] In some implementations, the disrupting or interfering comprises mutagenesis. In certain embodiments the disrupting or interfering comprises small molecule binding or a chemical or peptide modification of an AAV capsid protein.

[0019] In another aspect, the disclosure features non-naturally occurring AAV capsid proteins, including an AAV capsid having a recombinant amino acid sequence that differs from a wild type or unmodified sequence in at least one amino acid residue at a position selected from the group consisting of positions 263-265, 267, 268, 271, 382-385, 446, 471, 502, 503, 528-529, 589, 706, and 708 (relative to the AAV2 capsid sequence (SEQ ID NO:1 (top sequence in FIG. 1))), wherein the recombinant AAV amino acid sequence provides an altered affinity or avidity of the capsid protein for a liver cell than does the wild type AAV sequence.

[0020] In some implementations, the at least one amino acid residue that differs between the recombinant amino acid sequence and the wild type sequence is shown in Table 1.

[0021] In certain embodiments, the affinity or avidity of the non-naturally occurring AAV capsid protein for the liver is increased. In some implementations, the AAV capsid comprises a R at position 446 or a T at position 708 (relative to AAV2).

[0022] In certain embodiments, the affinity or avidity of the non-naturally occurring AAV capsid protein for the liver is decreased. In certain embodiments, the AAV capsid comprises an S at position 446 or an A at position 708 (relative to AAV2).

[0023] In another aspect, the disclosure features methods of altering the liver targeting of an AAV in a subject, the methods include administering an AAV comprising the non-naturally occurring AAV capsid protein described herein to the subject.

[0024] In yet another aspect, the disclosure features methods of altering the liver targeting of an AAV in a subject, the methods include administering an AAV comprising the non-naturally occurring AAV capsid protein described herein to the subject.

[0025] In one aspect, the disclosure provides viruses including a non-naturally occurring, modified AAV VP1 capsid protein. Typically, viruses as described herein include an amino acid sequence having at least 95% sequence identity to an amino acid sequence of an unmodified AAV VP1 capsid protein when the amino acid sequence of the modified AAV capsid protein and the amino acid sequence of the unmodified AAV VP1 capsid protein are aligned using a basic local alignment search tool (BLAST) program with default algorithm parameters; where the amino acid sequence of the modified VP1 capsid protein differs from the amino acid sequence of the unmodified VP1 capsid protein in at least one amino acid position selected from the group consisting of amino acid positions Q263, S264, G265, A266, S267, N268, H271, N382, G383, S384, Q385, S446, R471, W502, T503, D528, D529, Q589, K706, and V708, which are numbered relative to AAV2 VP1 capsid protein (SEQ ID NO:1) when SEQ ID NO:1 and the amino acid sequence of the unmodified AAV capsid protein are aligned using the basic local alignment search tool (BLAST) program with default algorithm parameters.

[0026] In some embodiments, the default parameters for BLASTP include: parameters automatically adjusted for short input sequences; expect threshold: 10; word size: 3; max matches in a query range: 0; matrix: BLOSUM62; gap costs: existence 11, extension 1; compositional adjustments: conditional compositional score matrix adjustment; and no filters or masks). In some embodiments, the default parameters for BLASTN are: parameters automatically adjusted for short input sequences; expect threshold: 10; word size: 28; max matches in a query range: 0; match/mismatch scores: 1,-2; gap costs: linear; filter: low complexity regions; and mask: for lookup table only.

[0027] In some embodiments, the amino acid sequence of the modified VP1 capsid protein includes at least one amino acid residue (e.g., at least two amino acid residues) selected from the group consisting of 446R, 471A, and 708T. In some embodiments, the amino acid sequence of the modified VP1 capsid protein comprises amino acid residues 446R, 471A, and 708T. In some embodiments, the amino acid sequence of the modified VP1 capsid protein comprises at least one amino acid residue (e.g., at least two amino acid residues) selected from the group consisting of 446S, 471S, and 708A. In some embodiments, the amino acid sequence of the modified VP1 capsid protein comprises 446S, 471S, and 708A.

[0028] In some embodiments, the amino acid sequence of the modified VP1 capsid protein differs from the amino acid sequence of the unmodified VP1 capsid protein only in one or more of the amino acid positions Q263, S264, G265, A266, S267, N268, H271, N382, G383, S384, Q385, S446, R471, W502, T503, D528, D529, Q589, K706, and V708, and in no other amino acid positions in the unmodified VP1 capsid protein.

[0029] In some embodiments, the unmodified VP1 capsid protein is selected from the group consisting of a VP1 capsid protein from AAV1, AAV2, AAV3, AAV6, AAV7, AAV8, AAV9, rh.10, hu.37, LK-03, AAV5, AAV10, Hu68; Anc80; Anc81; Anc82; Anc83; Anc84; Anc94; Anc113; Anc126; Anc127; Anc80L27; Anc80L59; Anc80L60; Anc80L62; Anc80L65; Anc80L33; Anc80L36; Anc80L44; Anc80L1; Anc110; Anc80DI; AAV1 vp1; AAV2 vp1; AAV9vp1; Anc80; Anc126; Anc127; AAV3; AAV7; AAV8; rh10; hu37; and hu.68.

[0030] In certain embodiments, the non-naturally occurring, modified AAV VP1 capsid protein includes an amino acid sequence having at least 96%, 97%, 98% or 99% sequence identity to the amino acid sequence of the unmodified AAV VP1 capsid protein when the amino acid sequence of the modified AAV capsid protein and the amino acid sequence of the unmodified AAV VP1 capsid protein are aligned using a basic local alignment search tool (BLAST) program with default algorithm parameters.

[0031] In another aspect, the disclosure provides modified, assembly-competent recombinant AAVs (rAAVs). Such AAVs include VP1, VP2, and VP3 capsid proteins, and a recombinant nucleic acid vector, where the VP1 capsid protein is a modified VP1 capsid protein as described herein.

[0032] In still another aspect, the disclosure provides modified, assembly-competent recombinant AAVs (rAAVs). Such AAVs include VP1, VP2, and VP3 capsid proteins; and a recombinant nucleic acid vector, where at least the VP1 capsid protein is a non-naturally occurring, modified VP1 capsid protein comprising an amino acid sequence having at least 95% sequence identity to an amino acid sequence of an unmodified AAV VP1 capsid protein when the amino acid sequence of the modified AAV capsid protein and the amino acid sequence of the unmodified AAV VP1 capsid protein are aligned using a basic local alignment search tool (BLAST) program with default algorithm parameters, and where the modified VP1 capsid protein differs from the unmodified VP1 capsid protein in comprising a means for altering biodistribution of the modified rAAV following administration of the modified rAAV to a first mammalian subject as compared to biodistribution of an unmodified rAAV following administration of the unmodified rAAV having the unmodified VP1 capsid protein to a second mammalian subject of the same type as the first mammalian subject, wherein the unmodified rAAV comprises VP1, VP2, and VP3 capsid proteins having amino acid sequences identical to those of the modified rAAV except for said means.

[0033] In some embodiments, the modified rAAV achieves higher transduction of liver cells following administration to a first mammalian subject as compared to transduction of liver cells following administration of the unmodified rAAV including the unmodified VP1 capsid protein to a second mammalian subject of the same type as the first mammalian subject. In some embodiments, the modified rAAV exhibits higher expression in liver cells of an expressible polypeptide encoded by the recombinant nucleic acid vector following administration to a first mammalian subject as compared to expression in liver cells of the expressible polypeptide following administration of an unmodified rAAV including the unmodified VP1 capsid protein to a second mammalian subject of the same type as the first mammalian subject.

[0034] In some embodiments, the modified rAAV achieves lower transduction of liver cells following administration to a first mammalian subject as compared to transduction of liver cells following administration of an unmodified rAAV including the unmodified VP1 capsid protein to a second mammalian subject of the same type as the first mammalian subject. In some embodiments, the modified rAAV exhibits lower expression in liver cells of an expressible polypeptide encoded by the recombinant nucleic acid vector following administration to a first mammalian subject as compared to expression in liver cells of the expressible polypeptide following administration of an unmodified rAAV including the unmodified VP1 capsid protein to a second mammalian subject of the same type as the first mammalian subject.

[0035] In some embodiments, the modified rAAV has an altered interaction with an AAV receptor (AAVR) expressed on liver cells of the first mammalian subject as compared to an unmodified rAAV including the unmodified VP1 capsid protein with an AAVR expressed on liver cells of the second mammalian subject. In some embodiments, the modified rAAV has increased interaction with an AAV receptor (AAVR) expressed on liver cells of the first mammalian subject as compared to an unmodified rAAV including the unmodified VP1 capsid protein with an AAVR expressed on liver cells of the second mammalian subject. In some embodiments, the modified rAAV has decreased interaction with an AAV receptor (AAVR) expressed on liver cells of the first mammalian subject as compared to an unmodified rAAV including the unmodified VP1 capsid protein with an AAVR expressed on liver cells of the second mammalian subject.

[0036] In some embodiments, the first and second mammalian subjects are humans or non-human primates (NHP). In some embodiments, the administration comprises systemic administration, e.g., intravenous infusion. In some embodiments, the modified rAAV has lower liver toxicity when administered to a mammalian subject, e.g., a human subject, than an unmodified rAAV comprising the unmodified VP1 capsid protein administered in the same amount by the same route of administration.

[0037] In some embodiments, means for altering biodistribution of the modified rAAV following administration of the modified rAAV to a first mammalian subject includes a mutation at one or more amino acid residues at positions selected from the group consisting of Q263, S264, G265, A266, S267, N268, H271, N382, G383, S384, Q385, S446, R471, W502, T503, D528, D529, Q589, K706, and V708, which are numbered relative to an AAV2 VP1 capsid protein (SEQ ID NO:1) when SEQ ID NO:1 and the amino acid sequence of the unmodified AAV capsid protein are aligned using the basic local alignment search tool (BLAST) program with default algorithm parameters.

[0038] In some embodiments, the modified VP1 capsid protein includes at least one amino acid residue (e.g., at least two amino acid residues) selected from the group consisting of 446R, 471A, and 708T. In some embodiments, the modified VP1 capsid protein comprises amino acid residues 446R, 471A, and 708T.

[0039] In some embodiments, the modified VP1 capsid protein includes at least one amino acid residue (e.g., at least two amino acid residues) selected from the group consisting of 446S, 471S, and 708A. In some embodiments, the modified VP1 capsid protein includes amino acid residues 446S, 471S, and 708A.

[0040] In some embodiments, the amino acid sequence of the modified VP1 capsid protein differs from the amino acid sequence of the unmodified VP1 capsid protein only in one or more of the amino acid positions Q263, S264, G265, A266, S267, N268, H271, N382, G383, S384, Q385, S446, R471, W502, T503, D528, D529, Q589, K706, and V708, and in no other amino acid positions in the unmodified VP1 capsid protein.

[0041] In some embodiments, the unmodified VP1 capsid protein is selected from the group consisting of a VP1 capsid protein from AAV1, AAV2, AAV3, AAV6, AAV7, AAV8, AAV9, rh.10, hu.37, LK-03, AAV5, AAV10, Hu68; Anc80; Anc81; Anc82; Anc83; Anc84; Anc94; Anc113; Anc126; Anc127; Anc80L27; Anc80L59; Anc80L60; Anc80L62; Anc80L65; Anc80L33; Anc80L36; Anc80L44; Anc80L1; Anc110; Anc80DI; AAV1 vp1; AAV2 vp1; AAV9vp1; Anc80; Anc126; Anc127; AAV3; AAV7; AAV8; rh10; hu37; and hu.68.

[0042] In some embodiments, the amino acid sequence of the modified VP1 capsid protein is at least 96% identical, 97% identical, 98% identical, or 99% identical to the amino acid sequence of the unmodified VP1 capsid protein.

[0043] In yet another aspect, pharmaceutical compositions are provided that include a modified rAAV as described herein, and a pharmaceutically acceptable carrier. In one aspect, nucleic acid molecules encoding a modified VP1 capsid protein as described herein or the VP1 protein of a modified rAAV as described herein.

[0044] In another aspect, vectors are provided that include a nucleic acid molecule as described herein. In another aspect, isolated host cells are provided that include a nucleic acid molecule as described herein or a vector as described herein.

[0045] In still another aspect, the disclosure provides methods of altering delivery of an expressible polynucleotide to a target organ of a mammalian subject (e.g., a human patient), e.g., as compared to delivery using an rAAV with an unmodified VP1 capsid protein. Such methods can include administering a therapeutically effective dose of a modified rAAV as described herein or a pharmaceutical composition as described herein to the human patient. In some embodiments, the expressible nucleic acid is a transgene.

[0046] In some embodiments, the modified rAAV exhibits higher transduction of an expressible polypeptide encoded by the recombinant nucleic acid vector into cells of the target organ following administration to a first mammalian subject as compared to transduction into cells of the target organ of the expressible polypeptide following administration of an unmodified rAAV comprising the unmodified VP1 capsid protein to a second corresponding mammalian subject.

[0047] In certain embodiments, the modified rAAV exhibits lower transduction of an expressible polypeptide encoded by the recombinant nucleic acid vector into cells of the target organ following administration to a first mammalian subject as compared to transduction into cells of the target organ of the expressible polypeptide following administration of an unmodified rAAV comprising the unmodified VP1 capsid protein to a second corresponding mammalian subject.

[0048] In some embodiments, the modified rAAV exhibits higher transduction of an expressible polypeptide encoded by the recombinant nucleic acid vector into cells outside of the target organ following administration to a first mammalian subject as compared to transduction into cells outside of the target organ of the expressible polypeptide following administration of an unmodified rAAV comprising the unmodified VP1 capsid protein to a second corresponding mammalian subject.

[0049] In some embodiments, the modified rAAV exhibits lower transduction of an expressible polypeptide encoded by the recombinant nucleic acid vector into cells outside of the target organ following administration to a first mammalian subject as compared to transduction into cells outside of the target organ of the expressible polypeptide following administration of an unmodified rAAV comprising the unmodified VP1 capsid protein to a second corresponding mammalian subject.

[0050] In certain embodiments, the modified rAAV exhibits higher expression of an expressible polypeptide encoded by the recombinant nucleic acid vector in cells in cells of the target organ following administration to a first mammalian subject as compared to expression in cells of the target organ of the expressible polypeptide following administration of an unmodified rAAV comprising the unmodified VP1 capsid protein to a second corresponding mammalian subject.

[0051] In some embodiments, the modified rAAV exhibits lower expression of an expressible polypeptide encoded by the recombinant nucleic acid vector in cells of the target organ following administration to a first mammalian subject as compared to expression in cells of the target organ of the expressible polypeptide following administration of an unmodified rAAV comprising the unmodified VP1 capsid protein to a second corresponding mammalian subject.

[0052] In some embodiments, the modified rAAV exhibits higher expression in cells outside of the target organ of an expressible polypeptide encoded by the recombinant nucleic acid vector following administration to a first mammalian subject as compared to expression in cells of the target organ of the expressible polypeptide following administration of an unmodified rAAV comprising the unmodified VP1 capsid protein to a second corresponding mammalian subject.

[0053] In certain embodiments, the modified rAAV exhibits lower expression in cells outside of the target organ of an expressible polypeptide encoded by the recombinant nucleic acid vector following administration to a first mammalian subject as compared to expression in cells of the target organ of the expressible polypeptide following administration of an unmodified rAAV comprising the unmodified VP1 capsid protein to a second corresponding mammalian subject.

[0054] In some embodiments, the target organ is the liver. In some embodiments, cells outside the target organ are muscle cells.

[0055] In some embodiments, the unmodified AAV is AAV1, AAV8, or AAV9, and the target organ, to which delivery is altered, is the heart; the unmodified AAV is AAV2, and the target organ, to which delivery is altered, is the kidney; the unmodified AAV is AAV7, AAV8, AAV9, and the target organ, to which delivery is altered, is the liver; the unmodified AAV is AAV4, AAV5, AAV6, AAV9, and the target organ, to which delivery is altered, is the lung; the unmodified AAV is AAV8, and the target organ, to which delivery is altered, is the pancreas; the unmodified AAV is AAV2, AAV5, AAV8, and the target organ, to which delivery is altered, is the photoreceptor cells of the eye; the unmodified AAV is AAV1, AAV2, AAV4, AAV5, AAV8, and the target organ, to which delivery is altered, is the Retinal Pigment Epithelium (RPE); and the unmodified AAV is AAV1, AAV6, AAV7, AAV8, AAV9, and the target organ, to which delivery is altered, is the skeletal muscle.

[0056] In some embodiments, the modified rAAV has lower liver toxicity when administered to a mammalian subject, e.g., a human subject, than the same dose of an unmodified rAAV comprising the unmodified VP1 capsid protein administered by the same route of administration. In some embodiments, the mammalian subject is a human subject or a non-human primate.

[0057] In still another aspect, the disclosure provides compositions for use in any of the methods described herein.

[0058] In one aspect, in a method of treating a mammalian subject (e.g., a human patient) by administering a recombinant AAV (rAAV), the improvement includes administering a therapeutically effective dose of a modified rAAV that comprises a capsid having means for altering rAAV biodistribution following administration to a mammalian subject.

[0059] In some embodiments, the means for altering rAAV biodistribution reduce liver clearance of the rAAV. In some embodiments, the means for altering rAAV biodistribution increase transduction of cells of a target organ. In some embodiments, the means for altering rAAV biodistribution increase expression in cells of a target organ of an expressible polypeptide encoded by the recombinant nucleic acid vector. In some embodiments, the means for altering rAAV biodistribution decrease transduction of cells of a target organ. In some embodiments, the means for altering rAAV biodistribution decrease expression in cells of a target organ of an expressible polypeptide encoded by the recombinant nucleic acid vector. In some embodiments, the means for altering rAAV biodistribution increase transduction of cells outside of a target organ.

[0060] In certain embodiments, the means for altering rAAV biodistribution increase expression in cells outside of a target organ of an expressible polypeptide encoded by the recombinant nucleic acid vector. In some embodiments, the means for altering rAAV biodistribution decrease transduction of cells outside of a target organ. In some embodiments, the means for altering rAAV biodistribution decrease expression in cells outside of a target organ of an expressible polypeptide encoded by the recombinant nucleic acid vector. In some embodiments, the means for altering rAAV biodistribution alter interaction of the modified rAAV with the AAVR expressed on cells of the mammalian subject. In some embodiments, the means for altering rAAV biodistribution reduce interaction of the modified rAAV with the AAVR. In some embodiments, the means for altering rAAV biodistribution increase interaction of the modified rAAV with the AAVR. In some embodiments, the modified rAAV has less liver toxicity than the unmodified rAAV.

[0061] In certain embodiments, the modified rAAV achieves a 10-fold reduction in gene transfer to liver cells after a first administration into a mammalian subject compared to an unmodified rAAV. In some embodiments, the modified rAAV achieves a 10-fold increase in gene transfer to liver cells after a first administration into a rhesus macaque compared to an unmodified rAAV.

[0062] In some embodiments, the modified rAAV achieves a 100-fold increase in gene transfer to liver cells following the first administration into a mammalian subject. In some embodiments, the modified rAAV achieves a 100-fold decrease in gene transfer to liver cells following the first administration into a mammalian subject.

[0063] In certain embodiments, the modified rAAV achieves a 1000-fold increase in gene transfer to liver cells following the first administration into a mammalian subject. In some embodiments, the modified rAAV achieves a 1000-fold decrease in gene transfer to liver cells following the first administration into a mammalian subject.

[0064] The term “mutation” refers to a change or alteration in the native or natural sequence or a nucleic acid or an amino acid. A mutation can be naturally occurring or a mutation can be engineered in the laboratory (e.g., man-made).

[0065] The term “unmodified AAV capsid protein” as used herein refers to a VP1, VP2, or VP3 capsid protein of a naturally occurring AAV serotype or a non-naturally occurring VP1, VP2, or VP3 capsid protein available or known in the art. The non-naturally occurring VP1, VP2, or VP3 capsid protein includes a capsid protein generated by biological or chemical alteration or variation of a naturally occurring AAV capsid protein. Accordingly, unmodified AAV capsid proteins include, but are not limited to, a capsid protein of various AAV serotypes (e.g., AAV1, AAV2, AAV3B, AAV5, AAV6, AAV8, and AAV9) or a variant thereof. As used herein, “variant” refers to a naturally occurring or artificially created relative of the indicated serotype available or known in the art. A non-naturally occurring VP1, VP2, or VP3 capsid protein further includes an artificial capsid protein created by in silico design or synthesis. An artificial capsid protein includes, but is not limited to, AAV capsid proteins disclosed in PCT/US2014/060163, U.S. Pat. No. 9,695,220, PCT/US2016/044819, PCT/US2018/032166, PCT/US2019/031851, and PCT/US2019/047546, which are incorporated herein by reference in their entireties.

[0066] Representative unmodified AAV capsid proteins can be VP1, VP2 or VP3 capsid proteins of an AAV selected from, without limitation, AAV2 (SEQ ID NO:1); rh. 58-E (SEQ ID NO:2); rh. 40-E (SEQ ID NO:3); AAV1 (SEQ ID NO:4); AAV6 (SEQ ID NO:5); AAV3 (SEQ ID NO:6); AAV LK03 (SEQ ID NO:7); AAV7 (SEQ ID NO:8); AAV8 (SEQ ID NO:9); AAV hu.37 (SEQ ID NO:10); AAV rh.10 (SEQ ID NO:11); AAV9 (SEQ ID NO:12); AAV hu.68 (SEQ ID NO:13); AAV10 (SEQ ID NO:14); AAV5 (SEQ ID NO:15); AAV3-3 (SEQ ID NO:16); AAV4-4 (SEQ ID NO:17); AAV1-A (SEQ ID NO:18); hu. 46-A (SEQ ID NO:19); hu. 48-A (SEQ ID NO:20); hu. 44-A (SEQ ID NO:21); hu. 43-A (SEQ ID NO:22), AAV6-A (SEQ ID NO:23); hu. 34-B (SEQ ID NO:24), hu. 47-B (SEQ ID NO:25), hu. 29-B (SEQ ID NO:26), rh. 63-B (SEQ ID NO:27), hu. 56-B (SEQ ID NO:28), hu. 45-B (SEQ ID NO:29), rh. 57-B (SEQ ID NO:30), rh. 35-B (SEQ ID NO:31); rh. 58-B (SEQ ID NO:32); rh. 28-B (SEQ ID NO:33); rh. 51-B (SEQ ID NO:34); rh. 19-B (SEQ ID NO:35); rh. 49-B (SEQ ID NO:36), rh. 52-B (SEQ ID NO:37); rh. 13-B (SEQ ID NO:38); AAV2-B (SEQ ID NO:39); rh. 20-B (SEQ ID NO:40); rh. 24-B (SEQ ID NO:41); rh. 64-B (SEQ ID NO:42); hu. 27-B (SEQ ID NO:43); hu. 21-B (SEQ ID NO:44); hu. 22-B (SEQ ID NO:45); hu. 23-B (SEQ ID NO:46); hu. 7-C(SEQ ID NO:47); hu. 61-C(SEQ ID NO:48); rh. 56-C(SEQ ID NO:49); hu. 9-C(SEQ ID NO:59); hu. 54-C(SEQ ID NO:51); hu. 53-C(SEQ ID NO:52); hu. 60-C(SEQ ID NO:53); hu. 55-C(SEQ ID NO:54); hu. 2-C (SEQ ID NO:55); hu. 1-C(SEQ ID NO:56); hu. 18-C(SEQ ID NO:57); hu. 3-C(SEQ ID NO:58); hu. 25-C(SEQ ID NO:59); hu. 15-C(SEQ ID NO:60); hu. 16-C(SEQ ID NO:61); hu. 11-C(SEQ ID NO:62); hu. 10-C(SEQ ID NO:63); hu. 4-C(SEQ ID NO:64); rh. 54-D (SEQ ID NO:65); rh. 48-D (SEQ ID NO:66); rh. 55-D (SEQ ID NO:67); rh. 62-D (SEQ ID NO:68); AAV7-D (SEQ ID NO:69); rh. 52-E (SEQ ID NO:70); rh. 51-E (SEQ ID NO:71); hu. 39-E (SEQ ID NO:72); rh. 53-E (SEQ ID NO:73); hu. 37-E (SEQ ID NO:74); rh. 43-E (SEQ ID NO:75); rh. 50-E (SEQ ID NO:76); rh. 49-E (SEQ ID NO:77); rh. 61-E (SEQ ID NO:78); hu. 41-E (SEQ ID NO:79); rh. 64-E (SEQ ID NO:80); hu. 42-E (SEQ ID NO:81); rh. 57-E (SEQ ID NO:82); rh. 40-E (SEQ ID NO:83); hu. 67-E (SEQ ID NO:84); hu. 17-E (SEQ ID NO:85); hu. 6-E (SEQ ID NO:86); hu. 66-E (SEQ ID NO:87); rh. 38-E (SEQ ID NO:88); hu. 32-F (SEQ ID NO:89); AAV9/hu (SEQ ID NO:90); hu. 31-F (SEQ ID NO:91); Anc80 (SEQ ID NO:92); Anc81 (SEQ ID NO:93); Anc82 (SEQ ID NO:94); Anc83 (SEQ ID NO:95); Anc84 (SEQ ID NO:96); Anc94 (SEQ ID NO:97); Anc113 (SEQ ID NO:98); Anc126 (SEQ ID NO:99); Anc127 (SEQ ID NO:100); Anc80L27 (SEQ ID NO:101); Anc80L59 (SEQ ID NO:102); Anc80L60 (SEQ ID NO:103); Anc80L62 (SEQ ID NO:104); Anc80L65 (SEQ ID NO:105); Anc80L33 (SEQ ID NO:106); Anc80L36 (SEQ ID NO:107); Anc80L44 (SEQ ID NO:108); Anc80L1 (SEQ ID NO:109); Anc110 (SEQ ID NO:110); Anc80DI (SEQ ID NO:111) and AAV8-E (SEQ ID NO:153).

[0067] The term “unmodified rAAV” as used herein refers to a recombinant AAV (rAAV) comprising only unmodified AAV capsid proteins.

[0068] Unless otherwise defined, all technical and scientific terms used herein have the same meaning as commonly understood by one of ordinary skill in the art to which the methods and compositions of matter belong. Although methods and materials similar or equivalent to those described herein can be used in the practice or testing of the methods and compositions of matter, suitable methods and materials are described below. In addition, the materials, methods, and examples are illustrative only and not intended to be limiting. All publications, patent applications, patents, and other references mentioned herein are incorporated by reference in their entirety.

### DESCRIPTION OF DRAWINGS

[0069] FIG. 1 is a schematic showing a minimal design of a library construct for AAV variants within a pooled barcoded library. ITR, Inverted Terminal Repeat; polyA, poly adenylation signals; ORF, open reading frame.

[0070] FIG. 2 is an alignment of Anc126 (SEQ ID NO:99) and Anc127 (SEQ ID NO:100) VP1 capsid protein sequences relative to the AAV2 capsid protein sequence (SEQ ID NO:1). The residues in the AAV2 capsid sequence predicted to interact with the AAVR footprint (the AAVR binding domain of the AAV capsid protein sequence) are boxed.

[0071] FIG. 3 is a fingerprint plot that illustrates relative rank of Anc126 variants in terms of murine liver targeting. Each Anc126 variant was ranked from top to bottom based on liver uptake following IV administration of a multiplex Anc126 library. Columns show the nine positions of variation that make up the diversity within Anc126. Each position of variation has two possible residues, represented here as black or white. The percent of variants with that particular residue (i.e., black) in either the top or bottom half rank-order is indicated in the accompanying table.

[0072] FIG. 4 is a fingerprint plot that illustrates relative rank of Anc127 variants in terms of murine liver targeting. Each Anc127 was ranked from top to bottom based on liver uptake following IV administration of a multiplex Anc127 library. Columns show the ten positions of variation that make up the diversity within Anc127. Each position of variation has two possible residues, represented here as black or white. The percent of variants with that particular residue (i.e., black) in either the top or bottom half rank-order is indicated in the accompanying table.

[0073] FIGS. 5A-5B are fingerprint plots that illustrate relative rank order of Anc126 (5A) and Anc127 (5B) variants in terms of murine liver targeting. Each Anc126 and Anc127 variant was ranked from top to bottom based on liver uptake following IV administration of a multiplex Anc126 and Anc127 libraries. Columns show the positions of variation that make up the diversity within Anc126 and Anc127 libraries. Each position of variation has two possible residues, represented here as black or white. The percent of variants with that particular residue (i.e., black) in either the top or bottom half rank-order is indicated in the accompanying table.

[0074] FIGS. 6A-6B are fingerprint plots of Anc80 libraries having a glycine (black) or an alanine (white) at residue 266 administered to two different non-human primates.

[0075] FIG. 7 represents an alignment of VP1 capsid proteins that can be used in the methods described herein (AAV2 (SEQ ID NO:1); AAV1 (SEQ ID NO:4); AAV6 (SEQ ID NO:5); AAV3 (SEQ ID NO:6); AAV LK03 (SEQ ID NO:7); AAV7 (SEQ ID NO:8); AAV8 (SEQ ID NO:9); AAV hu.37 (SEQ ID NO:10); AAV rh.10 (SEQ ID NO:11); AAV9 (SEQ ID NO:12); AAV hu.68 (SEQ ID NO:13); AAV10 (SEQ ID NO:14); and AAV5 (SEQ ID NO:15)). The locations of the variable toggle residues described herein are boxed.

[0076] FIG. 8 represents an alignment of the amino acid sequences of AAV VP1 capsid proteins that can be used in the methods described herein (AAV5 (SEQ ID NO:15); AAV3-3 (SEQ ID NO:16); AAV4-4 (SEQ ID NO:17); AAV1-A (SEQ ID NO:18); hu. 46-A (SEQ ID NO:19); hu. 48-A (SEQ ID NO:20); hu. 44-A (SEQ ID NO:21); hu. 43-A (SEQ ID NO:22), AAV6-A (SEQ ID NO:23); hu. 34-B (SEQ ID NO:24), hu. 47-B (SEQ ID NO:25), hu. 29-B (SEQ ID NO:26), rh. 63-B (SEQ ID NO:27), hu. 56-B (SEQ ID NO:28), hu. 45-B (SEQ ID NO:29), rh. 57-B (SEQ ID NO:30), rh. 35-B (SEQ ID NO:31); rh. 58-B (SEQ ID NO:32); rh. 28-B (SEQ ID NO:33); rh. 51-B (SEQ ID NO:34); rh. 19-B (SEQ ID NO:35); rh. 49-B (SEQ ID NO:36), rh. 52-B (SEQ ID NO:37); rh. 13-B (SEQ ID NO:38); AAV2-B (SEQ ID NO:39); rh. 20-B (SEQ ID NO:40); rh. 24-B (SEQ ID NO:41); rh. 64-B (SEQ ID NO:42); hu. 27-B (SEQ ID NO:43); hu. 21-B (SEQ ID NO:44); hu. 22-B (SEQ ID NO:45); hu. 23-B (SEQ ID NO:46); hu. 7-C(SEQ ID NO:47); hu. 61-C(SEQ ID NO:48); rh. 56-C(SEQ ID NO:49); hu. 9-C(SEQ ID NO:50); hu. 54-C(SEQ ID NO:51); hu. 53-C(SEQ ID NO:52); hu. 60-C (SEQ ID NO:53); hu. 55-C(SEQ ID NO:54); hu. 2-C(SEQ ID NO:55); hu. 1-C(SEQ ID NO:56); hu. 18-C(SEQ ID NO:57); hu. 3-C(SEQ ID NO:58); hu. 25-C(SEQ ID NO:59); hu. 15-C(SEQ ID NO:60); hu. 16-C(SEQ ID NO:61); hu. 11-C(SEQ ID NO:62); hu. 10-C(SEQ ID NO:63); hu. 4-C(SEQ ID NO:64); rh. 54-D (SEQ ID NO:65); rh. 48-D (SEQ ID NO:66); rh. 55-D (SEQ ID NO:67); rh. 62-D (SEQ ID NO:68); AAV7-D (SEQ ID NO:69); rh. 52-E (SEQ ID NO:70); rh. 51-E (SEQ ID NO:71); hu. 39-E (SEQ ID NO:72); rh. 53-E (SEQ ID NO:73); hu. 37-E (SEQ ID NO:74); rh. 43-E (SEQ ID NO:75); rh. 50-E (SEQ ID NO:76); rh. 49-E (SEQ ID NO:77); rh. 61-E (SEQ ID NO:78); hu. 41-E (SEQ ID NO:79); rh. 64-E (SEQ ID NO:80); hu. 42-E (SEQ ID NO:81); rh. 57-E (SEQ ID NO:82); rh. 40-E (SEQ ID NO:83); AAV8-E (SEQ ID NO:153); rh.58-E (SEQ ID NO:2); rh.40-E (SEQ ID NO:3); hu. 67-E (SEQ ID NO:84); hu. 17-E (SEQ ID NO:85); hu. 6-E (SEQ ID NO:86); hu. 66-E (SEQ ID NO:87); rh. 38-E (SEQ ID NO:88); hu. 32-F (SEQ ID NO:89); AAV9/hu (SEQ ID NO:90); and hu. 31-F (SEQ ID NO:91). The locations of the variable toggle residues described herein are boxed.

[0077] FIG. 9 represents an alignment of the amino acid sequences of AAV Anc capsid proteins that can be used in the methods described herein (AAV2 (SEQ ID NO:1); Anc80 (SEQ ID NO:92), Anc81 (SEQ ID NO:93), Anc82 (SEQ ID NO:94), Anc83 (SEQ ID NO:95), Anc84 (SEQ ID NO:96), Anc94 (SEQ ID NO:97), Anc113 (SEQ ID NO:98), Anc126 (SEQ ID NO:99), Anc127 (SEQ ID NO:100), Anc80L27 (SEQ ID NO:101), Anc80L59 (SEQ ID NO:102), Anc80L60 (SEQ ID NO:103), Anc80L62 (SEQ ID NO:104), Anc80L65 (SEQ ID NO:105), Anc80L33 (SEQ ID NO:106), Anc80L36 (SEQ ID NO:107), Anc80L44 (SEQ ID NO:108); Anc80L1 (SEQ ID NO:109); Anc110 (SEQ ID NO:110), Anc80DI (SEQ ID NO:111).

[0078] Among the sequences, SEQ ID NOs: 92-100 are sequences of the ancestral AAV capsid libraries disclosed in U.S. Pat. No. 9,695,220, incorporated by reference in its entirety herein. The libraries include Anc80 (SEQ ID NO:92), Anc81 (SEQ ID NO:93), Anc82 (SEQ ID NO:94), Anc83 (SEQ ID NO:95), Anc84 (SEQ ID NO:96), Anc94 (SEQ ID NO:97), Anc113 (SEQ ID NO:98), Anc126 (SEQ ID NO:99), and Anc127 (SEQ ID NO:100). FIG. 9 was generated using single member sequences (SEQ ID NOs 92-100) of each library, but the same analysis and alignment can be done with any other member of the libraries to identify locations of the variable toggle residues.

[0079] The locations of the variable toggle residues described herein are boxed. One or more amino acids in the toggle sites can be substituted, inserted and/or deleted as described herein to achieve a desired AAV biodistribution.

### DESCRIPTION AND LOCATION OF SEQUENCES

| SEQ ID NO: | VP1 capsid serotype: | Location: |
|---|---|---|
| 1 | AAV2 | FIG. 2, 7 |
| 2 | rh.58-E | FIG. 8 |
| 3 | rh.40-E | FIG. 8 |
| 4 | AAV1 | FIG. 7 |
| 5 | AAV6 | FIG. 7 |
| 6 | AAV3 | FIG. 7 |
| 7 | AAV LK03 | FIG. 7 |
| 8 | AAV7 | FIG. 7 |
| 9 | AAV8 | FIG. 7 |
| 10 | hu.37 | FIG. 7 |
| 11 | rh.10 | FIG. 7 |
| 12 | AAV9 | FIG. 7 |
| 13 | hu.68 | FIG. 7 |
| 14 | AAV10 | FIG. 7 |
| 15 | AAV5 | FIG. 7, 8 |
| 16 | AAV3-3 | FIG. 8 |
| 17 | AAV4-4 | FIG. 8 |
| 18 | AAV1-A | FIG. 8 |
| 19 | hu.46-A | FIG. 8 |
| 20 | hu.48-A | FIG. 8 |
| 21 | hu.44-A | FIG. 8 |
| 22 | hu.43-A | FIG. 8 |
| 23 | AAV6-A | FIG. 8 |
| 24 | hu.34-B | FIG. 8 |
| 25 | hu.47-B | FIG. 8 |
| 26 | hu.29-B | FIG. 8 |
| 27 | rh.63-B | FIG. 8 |
| 28 | hu.56-B | FIG. 8 |
| 29 | hu.45-B | FIG. 8 |
| 30 | rh.57-B | FIG. 8 |
| 31 | rh.35-B | FIG. 8 |
| 32 | rh.58-B | FIG. 8 |
| 33 | rh.28-B | FIG. 8 |
| 34 | rh.51-B | FIG. 8 |
| 35 | rh.19-B | FIG. 8 |
| 36 | rh.49-B | FIG. 8 |
| 37 | rh.52-B | FIG. 8 |
| 38 | rh.13-B | FIG. 8 |
| 39 | AAV2-B | FIG. 8 |
| 40 | rh.20-B | FIG. 8 |
| 41 | rh.24-B | FIG. 8 |
| 42 | rh.64-B | FIG. 8 |
| 43 | hu.27-B | FIG. 8 |
| 44 | hu.21-B | FIG. 8 |
| 45 | hu.22-B | FIG. 8 |
| 46 | hu.23-B | FIG. 8 |
| 47 | hu.7-C | FIG. 8 |
| 48 | hu.61-C | FIG. 8 |
| 49 | rh.56-C | FIG. 8 |
| 50 | hu.9-C | FIG. 8 |
| 51 | hu.54-C | FIG. 8 |
| 52 | hu.53-C | FIG. 8 |
| 53 | hu.60-C | FIG. 8 |
| 54 | hu.55-C | FIG. 8 |
| 55 | hu.2-C | FIG. 8 |
| 56 | hu.1-C | FIG. 8 |
| 57 | hu.18-C | FIG. 8 |
| 58 | hu.3-C | FIG. 8 |
| 59 | hu.25.C | FIG. 8 |
| 60 | hu.15-C | FIG. 8 |
| 61 | hu.16-C | FIG. 8 |
| 62 | hu.11-C | FIG. 8 |
| 63 | hu.10-C | FIG. 8 |
| 64 | hu.4-C | FIG. 8 |
| 65 | rh.54-D | FIG. 8 |
| 66 | rh.48-D | FIG. 8 |
| 67 | rh.55-D | FIG. 8 |
| 68 | rh.62-D | FIG. 8 |
| 69 | AAV7-D | FIG. 8 |
| 70 | rh.52-E | FIG. 8 |
| 71 | rh.51-E | FIG. 8 |
| 72 | hu.39-E | FIG. 8 |
| 73 | rh.53-E | FIG. 8 |
| 74 | hu.37-E | FIG. 8 |
| 75 | rh.43-E | FIG. 8 |
| 76 | rh.50-E | FIG. 8 |
| 77 | rh.49-E | FIG. 8 |
| 78 | rh.61-E | FIG. 8 |
| 79 | hu.41-E | FIG. 8 |
| 80 | rh.64-E | FIG. 8 |
| 81 | hu.42-E | FIG. 8 |
| 82 | rh.57-E | FIG. 8 |
| 83 | rh.40-E | FIG. 8 |
| 84 | hu.67-E | FIG. 8 |
| 85 | hu.17-E | FIG. 8 |
| 86 | hu.6-E | FIG. 8 |
| 87 | hu.66-E | FIG. 8 |
| 88 | rh.38-E | FIG. 8 |
| 89 | hu.32-F | FIG. 8 |
| 90 | AAV9/hu | FIG. 8 |
| 91 | hu.31-F | FIG. 8 |
| 92 | Anc80 | FIG. 9 |
| 93 | Anc81 | FIG. 9 |
| 94 | Anc82 | FIG. 9 |
| 95 | Anc83 | FIG. 9 |
| 96 | Anc84 | FIG. 9 |
| 97 | Anc94 | FIG. 9 |
| 98 | Anc113 | FIG. 9 |
| 99 | Anc126 | FIG. 2, 9 |
| 100 | Anc127 | FIG. 2, 9 |
| 101 | Anc80L27 | FIG. 9 |
| 102 | Anc80L59 | FIG. 9 |
| 103 | Anc80L60 | FIG. 9 |
| 104 | Anc80L62 | FIG. 9 |
| 105 | Anc80L65 | FIG. 9 |
| 106 | Anc80L33 | FIG. 9 |
| 107 | Anc80L36 | FIG. 9 |
| 108 | Anc80L44 | FIG. 9 |
| 109 | Anc80L1 | FIG. 9 |
| 110 | Anc110 | FIG. 9 |
| 111 | Anc80DI | FIG. 9 |
| 112 | AAV2 and modifications thereof | Appendix |
| 113 | AAV1 and modifications thereof | Appendix |
| 114 | AAV6 and modifications thereof | Appendix |
| 115 | AAV3 and modifications thereof | Appendix |
| 116 | AAV LK03 and modifications thereof | Appendix |
| 117 | AAV7 and modifications thereof | Appendix |
| 118 | AAV8 and modifications thereof | Appendix |
| 119 | AAV hu.37 and modifications thereof | Appendix |
| 120 | AAV rh.10 and modifications thereof | Appendix |
| 121 | AA9 and modifications thereof | Appendix |
| 122 | hu.68 and modifications thereof | Appendix |
| 123 | AAV10 and modifications thereof | Appendix |
| 124 | AA5 and modifications thereof | Appendix |
| 125 | AAV2 and modifications thereof | Appendix |
| 126 | AAV1 and modifications thereof | Appendix |
| 127 | AAV6 and modifications thereof | Appendix |
| 128 | AAV3 and modifications thereof | Appendix |
| 129 | AAV LK03 and modifications thereof | Appendix |
| 130 | AAV7 and modifications thereof | Appendix |
| 131 | AAV8 and modifications thereof | Appendix |
| 132 | AAV hu.37 and modifications thereof | Appendix |
| 133 | AAV rh.10 and modifications thereof | Appendix |
| 134 | AA9 and modifications thereof | Appendix |
| 135 | hu.68 and modifications thereof | Appendix |
| 136 | AAV10 and modifications thereof | Appendix |
| 137 | AA5 and modifications thereof | Appendix |
| 138 | Anc80 scaffold | Appendix |
| 139 | Anc81 scaffold | Appendix |
| 140 | Anc82 scaffold | Appendix |
| 141 | Anc83 scaffold | Appendix |
| 142 | Anc84 scaffold | Appendix |
| 143 | Anc94 scaffold | Appendix |
| 144 | Anc113 scaffold | Appendix |
| 145 | Anc126 scaffold | Appendix |
| 146 | Anc127 scaffold | Appendix |
| 147 | Anc80 scaffold nucleic acid | Appendix |
| 148 | Anc81 scaffold nucleic acid | Appendix |
| 149 | Anc110 scaffold nucleic acid | Appendix |
| 150 | Anc126 scaffold nucleic acid | Appendix |
| 151 | Anc127 scaffold nucleic acid | Appendix |
| 152 | AAV2 nucleic acid | Appendix |
| 153 | AAV8-E | FIG. 8 |

### DETAILED DESCRIPTION

[0081] The current disclosure indicates that, through various points of interaction between AAV and the AAVR, the bio-distribution of the AAV (e.g., the amount of vector uptake and transduction) to and into cells in the liver and expression of an expressible nucleic acid such as a transgene in target cells can be modulated (e.g., decreased or increased), while maintaining, or even increasing, transduction of cells in other organs and peripheral tissues, such as muscle. This disclosure provides guidance on how to alter AAV capsid protein sequences to modulate the AAVR-AAV interaction in such a way that preserves the ability of AAV to engage with and bind to the AAV receptor for it to functionally enter and transduce a cell, yet changes its affinity, avidity, binding, and dissociation constants, and/or the receptor-ligand kinetics, in a manner sufficient to modify transduction, thus altering the bio-distribution of AAV to cells in the liver and in other organs and tissues, e.g., muscle tissue, within the body following in vivo administration. Based on this disclosure, the sequence of an AAV can be altered to modulate the bio-distribution of the AAV, e.g., by modulating transduction by an AAV of liver cells, without inhibiting binding of the AAV to the liver and other cells, within a patient or subject.

### Adeno Associated Virus (AAV)

[0082] Gene transfer, either for experimental or therapeutic purposes, relies upon a vector or vector system to shuttle genetic information into target cells. The vector or vector system is considered the major determinant of efficiency, specificity, host response, pharmacology, and longevity of the gene transfer reaction. Currently, the most efficient and effective way to accomplish gene transfer is through the use of vectors or vector systems based on viruses that have been made replication-defective. Some of the vectors that have shown success as gene therapy vehicles are based on adeno-associated viruses (AAVs).

[0083] Viral polypeptides can be assembled into a virus particle using, for example, a packaging host cell. The components of a virus particle (e.g., rep sequences, cap sequences, inverted terminal repeat (ITR) sequences) can be introduced into a packaging host cell using one or more viral vectors as described herein. Once assembled, virus particles can be screened for their ability to target the liver. Methods of determining the ability of an AAV to target the liver are described herein (see, for instance, Example 3).

[0084] In addition, virus particles as described herein can be screened for any number of other features or phenotypes (e.g., the ability to replicate; gene transfer properties; receptor binding ability; and/or seroprevalence in a population). In addition, methods of determining whether a virus particle binds to its receptor is known in the art, and such methods can be performed in vitro or in vivo.

[0085] Virus particles can be purified, if desired, using routine methods. As used herein, “purified” virus particles refer to virus particles that are removed from components in the mixture in which they were made such as, but not limited to, viral components (e.g., rep sequences, cap sequences), packaging host cells, and partially- or incompletely-assembled virus particles.

### AAV Liver Toggle

[0086] Previously, a particular position within the AAV VP1 capsid protein was identified that, when toggled between two different amino acids (glycine and alanine) at that position, quantitatively altered liver uptake and expression following intravenous injection of AAV in mice, non-human primates, and mice with humanized livers, as well as co-cultures of human hepatocyte (see, for example, WO 2019/217911, incorporated herein by reference in its entirety). This observation was made initially using an Anc80 AAV variant library; Anc80 is a predicted ancestral AAV scaffold sequence (see, for example, WO 2015/054653, incorporated herein by reference in its entirety). This observation is significant, because this particular residue change (G to A, or A to G) is one of the most conservative amino acid substitutions possible, yet such a conservative change still imparts very distinct liver-on/liver-off toggling.

[0087] Further work extended the relevance of this conserved toggle to other AAV viruses including natural AAV variants, AAV3B and AAV9, in which the natural variant was in “liver off” or “liver on” position, respectively. Based on this work, each liver state could be converted into the opposite state by making the indicated amino-acid substitution (see, for example, WO 2019/217911). In addition, data on the liver toggle “off” variants of Anc80 and AAV9 demonstrated that, while liver targeting is substantially reduced, uptake in non-liver tissues such as muscle is preserved quantitatively or, in certain cases, increased.

[0088] It would be appreciated by a skilled artisan that identifying and changing one or more of the “liver toggle” sequences described herein (e.g., to change an AAV from a liver-on to a liver-off, or vice versa) requires that the context of a sequence, sometimes due to the context of a resulting structural feature, be preserved. For at least that reason, the numbering of the positions referred to herein is relative to the sequence of the AAV2 VP1 protein, which is shown in SEQ ID NO:1. It would be understood, however, that any AAV, whether naturally occurring such as AAV1, AAV2, AAV3, AAV5, AAV6, AAV7, AAV8, AAV9, rh.10, hu.37, LK-03, AAV5, AAV10, and Hu68, or modified or variant such as AAV ShH10, and AAV-DJ, as well as variants such as the Anc80 AAV variant library (see, for example, WO 2015/054653) Anc80; Anc81; Anc82; Anc83; Anc84; Anc94; Anc113; Anc126; Anc127; Anc80L27; Anc80L59; Anc80L60; Anc80L62; Anc80L65; Anc80L33; Anc80L36; Anc80L44; Anc80L1; Anc110; Anc80DI, could be used as an unmodified sequence, i.e., reference sequence, although the numerical position may change from those referred to herein if a different reference sequence is used.

[0089] The context of a sequence, or the position of one or more amino acids in one sequence relative to another, typically is determined using a sequence alignment algorithm (e.g., Altschul et al., 1997, Nucleic Acids Res., 25:3389 3402 as incorporated into BLAST (basic local alignment search tool) programs, available at ncbi.nlm.nih.gov on the World Wide Web). BLAST or similar algorithms can be used to align two sequences (e.g., to identify the residue at a “corresponding” position, even if the two sequences differ, for example, in length), to identify motifs or consensus sequences, and/or to determine percent sequence identity between two or more sequences (nucleic acid or amino acid).

[0090] As used herein, “default parameters” used when comparing two sequences are the default parameters using the BLAST algorithm (Version BLAST+2.10.1) as implemented at blast.ncbi.nlm.nih.gov on the World Wide Web on Sep. 9, 2020. For aligning protein sequences, the default parameters are BLASTP: parameters automatically adjusted for short input sequences; expect threshold: 10; word size: 3; max matches in a query range: 0; matrix: BLOSUM62; gap costs: existence 11, extension 1; compositional adjustments: conditional compositional score matrix adjustment; and no filters or masks). For aligning nucleic acid sequences, the default parameters are BLASTN: parameters automatically adjusted for short input sequences; expect threshold: 10; word size: 28; max matches in a query range: 0; match/mismatch scores: 1,-2; gap costs: linear; filter: low complexity regions; and mask: for lookup table only.

[0091] For example, the alignments shown in FIGS. 7 and 8 of VP1 capsid proteins from a number of different AAV serotypes, or a similarly produced alignment, sometimes referred to as a “pile-up,” is one method that can be used to identify a position of an amino acid relative to, for example, AAV2 or any other unmodified AAV sequence.

### The AAV-AAVR Interaction

[0092] It has previously been shown that the majority of AAV serotypes, except AAV4 and rh.32.33, require, and thus are dependent on, the AAV receptor (AAVR) for cellular transduction (Dudek et al., 2018, 1 Virol., 92(7) pii: e02213-17). The current disclosure describes the specific changes that can be made to the AAV capsid protein sequence to modulate the AAVR-AAV interaction by altering binding (e.g., affinity and/or avidity) to provide a modified “off” rate for this interaction. These specific changes to the AAV capsid protein sequence when used in vivo dramatically alter the liver uptake of “liver on” vectors versus “liver off” vectors, suggesting that reduced affinity AAVR-AAV interactions limit the binding and eventual uptake of liver toggle off vectors in the context of vectors circulating in blood and passing through the liver.

[0093] The data described herein further indicate that, in non-liver tissues, particularly those tissues compartmentalized from the vasculature (e.g., musculature), uptake and transduction of AAV is preserved, and, in certain embodiments, increases for vectors that are liver-de-targeted. While not wishing to be bound by theory, it is believed that this may be because in those non-liver tissues, the AAVR-AAV binding affinity is less impactful to transduction than in the absence of circulation, so the AAV resides in proximity to the tissue for a longer duration, reducing the influence of the binding kinetics on eventual tissue targeting. Again, while not wishing to be bound by theory, the increased level of transduction of liver de-targeted AAVs that is observed in certain non-liver tissues may additionally and/or alternatively be due to the increased bio-distribution, since less AAV would be depleted by liver uptake.

[0094] AAVR appears to be abundantly expressed in most tissues and those levels appear to be relatively similar across most tissues. Therefore, contrary to early predictions, the abundance of AAVR expression has not been directly predictive of AAV's tissue tropism. Instead, based on the data disclosed herein, AAV tissue tropism is influenced primarily by altered AAV sequence variants, including AAV sequence variants that retain dependence on AAVR. This further suggests that the structure of AAV can influence binding to AAVR and/or the engagement of cellular co-factors involved in binding to AAVR.

### Methods of Modifying the Bio-Distribution of AAV

[0095] Changes can be introduced into an AAV nucleic acid molecule, leading to changes in the amino acid sequence of the encoded polypeptide(s). For example, changes can be introduced into nucleic acid coding sequences using mutagenesis (e.g., site-directed mutagenesis, PCR-mediated mutagenesis, CRISPR/Cas9 or other site-specific endonuclease-mediated mutagenesis) or by chemically synthesizing a nucleic acid molecule having such changes. Such nucleic acid changes can lead to conservative and/or non-conservative amino acid substitutions at one or more amino acid residues. A “conservative amino acid substitution” is one in which one amino acid residue is replaced with a different amino acid residue having a similar side chain (see, for example, Dayhoff et al. (1978, in Atlas of Protein Sequence and Structure, 5(Suppl. 3):345-352), which provides frequency tables for amino acid substitutions), and a non-conservative substitution is one in which an amino acid residue is replaced with an amino acid residue that does not have a similar side chain.

[0096] As described herein, positions Q263, S264, G265, A266, S267, N268, H271, N382, G383, S384, Q385, S446, R471, W502, T503, D528, D529, Q589, K706, or V708 in a capsid protein (numbered relative to the AAV2 VP1 capsid sequence (SEQ ID NO:1)) are involved in the binding to AAVR, and any one or more of those positions can be changed from their original amino acid, e.g., wild type or naturally occurring amino acid at that position, or the amino acid that is present at that position within a variant AAV, to modify (but not inhibit) binding between the modified AAV capsid protein and an AAV receptor (AAVR) on a liver cell in a manner that alters the AAV's ability to transduce a liver cell, thus altering the tropism or bio-distribution to the liver cells when the AAV is administered to a subject or patient and enters the circulation. Thus, changes are made in one or more of the residues at the indicated positions in a manner that results in an altered tropism of the modified (e.g., non-naturally occurring) AAV, but does not inhibit binding of the AAV to the AAVR of a given cell, which permits the liver de-targeted AAVs to bind to and transduce other types of cells in the body.

[0097] Specifically, at least positions 446, 471, and/or 708 within the VP1 capsid protein of AAV (numbered relative to the AAV2 VP1 capsid sequence (SEQ ID NO:1)) can be changed from their original, or wild type, sequence. As demonstrated in the Examples below, bio-distribution to the liver cells can be increased when the AAV capsid contains an R at position 446, an A at position 471, and/or a T at position 708, whereas bio-distribution to the liver cells can be decreased when the AAV capsid contains an S at position 446, an S at position 471, and/or an A at position 708 (all numbered relative to AAV2 (SEQ ID NO:1)). In some embodiments, a VP1 protein contains one or more of the following changes: S446N, S446R, R471A, R471S, V708T, or V708A (numbered relative to the AAV2 capsid sequence (SEQ ID NO:1)).

[0098] Specifically, at least positions 446, 471, and/or 708 within the VP1 capsid protein of AAV (numbered relative to the AAV2 VP1 capsid sequence (SEQ ID NO:1)) can be changed from their original, or wild type, sequence. As demonstrated in the Examples below, bio-distribution to the liver cells can be increased when the AAV capsid contains an R at position 446, an A at position 471, and/or a T at position 708, whereas bio-distribution to the liver cells can be decreased when the AAV capsid contains an S at position 446, an S at position 471, and/or an A at position 708 (all numbered relative to AAV2 (SEQ ID NO:1)). In some embodiments, a VP1 protein contains one or more of the following changes: S446N, S446R, R471A, R471S, V708T, or V708A (numbered relative to the AAV2 capsid sequence (SEQ ID NO:1)).

[0099] Specifically, at least positions 266, 271, and/or 446 within the VP1 capsid protein of AAV (numbered relative to the AAV2 VP1 capsid sequence (SEQ ID NO:1)) can be changed from their original, or wild type, sequence. Bio-distribution to the liver cells can be altered when the AAV capsid contains, for example, an A or a G at position 266, an H or T at position 271, and/or a S, N or R at position 446 (all numbered relative to AAV2 (SEQ ID NO:1)). In some embodiments, a VP1 protein contains one or more of the following changes: A266G, H271T, R446A, or R446S (numbered relative to the AAV2 capsid sequence (SEQ ID NO:1)).

[0100] Specifically, at least positions 471, 589, and/or 708 within the VP1 capsid protein of AAV (numbered relative to the AAV2 VP1 capsid sequence (SEQ ID NO:1)) can be changed from their original, or wild type, sequence. Bio-distribution to the liver cells can be altered when the AAV capsid contains, for example, an R, A or S at position 471, a Q or an A at position 589, and/or a V, T or A at position 708 (all numbered relative to AAV2 (SEQ ID NO:1)). In some embodiments, a VP1 protein contains one or more of the following changes: R471A, R471S, Q589A, V708T, or V708A (numbered relative to the AAV2 capsid sequence (SEQ ID NO:1)).

[0101] Specifically, at least positions 266, 446, and/or 589 within the VP1 capsid protein of AAV (numbered relative to the AAV2 VP1 capsid sequence (SEQ ID NO:1)) can be changed from their original, or wild type, sequence. As demonstrated in the Examples below, bio-distribution to the liver cells can be altered when the AAV capsid contains an A or a G at position 266, a S, N or R at position 446, and/or a Q or A at position 589 (all numbered relative to AAV2 (SEQ ID NO:1)). In some embodiments, a VP1 protein contains one or more of the following changes: A266G, S446N, S446R, or Q589R (numbered relative to the AAV2 capsid sequence (SEQ ID NO:1)).

[0102] Specifically, at least positions 271, 446, and/or 471 within the VP1 capsid protein of AAV (numbered relative to the AAV2 VP1 capsid sequence (SEQ ID NO:1)) can be changed from their original, or wild type, sequence. Bio-distribution to the liver cells can be altered when the AAV capsid contains an H or a T at position 271, an S, N or R at position 446, and/or an R, A or S at position 471 (all numbered relative to AAV2 (SEQ ID NO:1)). In some embodiments, a VP1 protein contains one or more of the following changes: H271T, S446N, S446R, R471A or R471S (numbered relative to the AAV2 capsid sequence (SEQ ID NO:1)).

[0103] Nucleic acids can be obtained or produced using any number of methods including, without limitation, chemical synthesis, recombinant nucleic acid technology, and/or the polymerase chain reaction (PCR). General PCR techniques are described, for example in PCR Primer: A Laboratory Manual (Dieffenbach & Dveksler, Eds., Cold Spring Harbor Laboratory Press, 1995), and recombinant nucleic acid techniques include, for example, restriction enzyme digestion and ligation. See, for example, Sambrook et al. (1989, Molecular Cloning; a laboratory manual, Cold Spring Harbor Laboratory Press, Cold Spring Harbor, NY).

[0104] Vectors containing nucleic acid molecules that encode polypeptides also are provided. Vectors, including expression vectors, are commercially available or can be produced by recombinant technology. A vector containing a nucleic acid molecule can have one or more elements for expression operably linked to such a nucleic acid molecule, and further can include sequences such as those encoding a selectable marker (e.g., an antibiotic resistance gene), and/or those that can be used in purification of a polypeptide (e.g., 6×His tag). Elements for expression include nucleic acid sequences that direct and regulate expression of nucleic acid coding sequences. One example of an expression element is a promoter sequence (e.g., CMV or other suitable viral promoters such as, without limitation, p5, p19, and p40). Expression elements also can include one or more of introns, enhancer sequences, response elements, or inducible elements that modulate expression of a nucleic acid molecule. Expression elements can be of bacterial, yeast, insect, mammalian, or viral origin and vectors can contain a combination of expression elements from different origins. As used herein, operably linked means that elements for expression are positioned in a vector relative to a coding sequence in such a way as to direct or regulate expression of the coding sequence.

[0105] A nucleic acid molecule, e.g., a nucleic acid molecule in a vector (e.g., an expression vector or a viral vector) can be introduced into a host cell. The term “host cell” refers not only to the particular cell(s) into which the nucleic acid molecule has been introduced, but also to the progeny or potential progeny of such a cell. Many suitable host cells are known to those skilled in the art; host cells can be prokaryotic cells (e.g., E. coli) or eukaryotic cells (e.g., yeast cells, insect cells, plant cells, mammalian cells). Representative host cells can include, without limitation, A549, WEHI, 3T3, 10T1/2, BHK, MDCK, COS 1, COS 7, BSC 1, BSC 40, BMT 10, VERO, WI38, HeLa, 293 cells, Saos, C2C12, L cells, HT1080, HepG2 and primary fibroblast, hepatocyte, and myoblast cells derived from mammals including human, monkey, mouse, rat, rabbit, and hamster. Methods for introducing nucleic acid molecules into host cells are well known in the art and include, without limitation, calcium phosphate precipitation, electroporation, heat shock, lipofection, microinjection, and viral-mediated nucleic acid transfer (e.g., transduction).

### Toggle Sites

[0106] The present disclosure provides specific residues of AAV capsid proteins that can be modified to change targeting in vivo when rAAV is administered to a mammalian subject. Modification of the specific residues can alter transduction of target cells and/or transgene expression in target cells. The specific residues are referred to as toggle sites.

[0107] The toggle sites comprise amino acid residues involved in interactions between AAV capsid protein and AAVR, specifically at Q263, S264, G265, A266, S267, N268, H271, N382, G383, S384, Q385, S446, R471, W502, T503, D528, D529, Q589, K706, and V708, wherein the amino acid position is numbered relative to SEQ ID NO: 1 (AAV2 VP1). FIG. 7, FIG. 8 and FIG. 9 show the respective toggle sites highlighted on the amino acid sequence of various unmodified AAV VP1 capsid proteins.

[0108] Target-specific tropism of AAVs can be altered by changing one or more amino acids at the toggle sites. A modified capsid protein (e.g., modified VP1 capsid) provided herein includes one or more amino acid difference in the toggle sites—Q263, S264, G265, A266, S267, N268, H271, N382, G383, S384, Q385, S446, R471, W502, T503, D528, D529, Q589, K706, and V708—compared to an unmodified capsid protein.

[0109] In some embodiments, the modification is introduced at selected toggle sites consisting of S446, R471 and V708. In some embodiments, the modification is not at A266.

[0110] Modification of the toggle sites can alter biodistribution of the modified rAAV. In some embodiments, the modification increases transduction of target cells compared to an unmodified rAAV. In some embodiments, the modification increases expression of an expressible polynucleotide delivered by the modified rAAV compared to an unmodified rAAV in target cells. In some embodiments, the modification decreases transduction of target cells compared to an unmodified rAAV. In some embodiments, the modification decreases expression of an expressible polynucleotide delivered by the modified rAAV compared to an unmodified rAAV in target cells. In some embodiments, the target is liver and the target cells are hepatocytes. In some embodiments, the target is not liver.

### Modified AAV Capsid Protein

[0111] Modified capsid proteins of the present disclosure comprise means for altering rAAV biodistribution following administration to a mammalian subject as compared to biodistribution of an unmodified rAAV comprising VP1, VP2, and VP3 capsid proteins having amino acid sequences identical to those of the modified rAAV except for said means. rAAVs comprising the modified capsid proteins are referred to as modified rAAVs.

[0112] The means can alter the biodistribution when administered locally or systemically. In some embodiments, the means alter biodistribution when intravenously infused.

[0113] In some embodiments, the means for altering rAAV biodistribution change interaction of the modified rAAV with AAVR expressed on the mammalian subject's cells. For example, the means for altering rAAV biodistribution reduce or increase interaction of the modified rAAV with AAVR. In some embodiments, the means change binding affinity or binding stability between the modified AAV capsid protein and AAVR compared to an unmodified AAV capsid protein and AAVR. In some embodiments, the means comprise changes in the interaction interface between AAV capsid protein (VP1, VP2, or VP3 capsid protein) and AAVR.

[0114] In some embodiments, the means for altering rAAV biodistribution comprise a presence or absence of certain amino acid residues at one or more positions selected from the group consisting of Q263, S264, G265, A266, S267, N268, H271, N382, G383, S384, Q385, S446, R471, W502, T503, D528, D529, Q589, K706, and V708, wherein the amino acid position is numbered relative to SEQ ID NO: 1 (AAV2 VP1). In some embodiments, more than one amino acids can be substituted, inserted, and/or deleted at one or more positions selected from the group consisting of Q263, S264, G265, A266, S267, N268, H271, N382, G383, S384, Q385, S446, R471, W502, T503, D528, D529, Q589, K706, and V708 to introduce the means for altering rAAV biodistribution.

[0115] In some embodiments, the means for altering rAAV biodistribution comprises one or more amino acid substitution, insertion and/or deletion at one or more of the toggle sites—Q263, S264, G265, A266, S267, N268, H271, N382, G383, S384, Q385, S446, R471, W502, T503, D528, D529, Q589, K706, and V708. The amino acid substitution, insertion and/or deletion can change one or more original amino acid residues at a toggle site to one or more different amino acid residues that occur at the same toggle site of a different AAV capsid as provided in Tables 1A, 1B, 1C and 2. For example, the Q263 toggle site (relative to AAV2) can be changed from Q to any of A, E, T or G. The Q264 toggle site of AAV1 can be changed from S to any of G, T, A or V. Toggle sites where one or more amino acid substitution, insertion and/or deletion can be introduced are highlighted with boxes in FIG. 7 and FIG. 8.

[0116] In some embodiments, a modified VP1 capsid protein has a sequence shown in SEQ ID NO: 112-137. In some embodiments, a modified VP1 capsid protein has a sequence having at least 95%, 96%, 97%, 98%, 99%, or 95.5% identity to one of the sequences shown in SEQ ID NO: 112-137.

[0117] In some embodiments, a modified VP1 capsid protein has one of the sequences shown in SEQ ID NO: 2-100, 138-146 or 153 with one or more amino acid substitutions, insertions, and/or deletions at one of the toggle sites—Q263, S264, G265, A266, S267, N268, H271, N382, G383, S384, Q385, S446, R471, W502, T503, D528, D529, Q589, K706, and V708, wherein the amino acid position is numbered relative to SEQ ID NO: 1 (AAV2 VP1). In some embodiments, a modified VP1 capsid protein has one of the sequences shown in SEQ ID NO: 2-100, 138-146 or 153 with one or more amino acid substitutions, insertions, and/or deletions at one of the selected toggle sites—S446, R471 and V708, wherein the amino acid position is numbered relative to SEQ ID NO: 1 (AAV2 VP1).

TABLE 1A

| Position | AAV2 | AAV1 | AAV6 | AAV3 | AAVLK03 | AAV7 | AAV8 | AAVhu.37 | AAVrh.10 | AAV9 | AAVhu.68 | AAV10 | AAV5 |
|---|---|---|---|---|---|---|---|---|---|---|---|---|---|
| 263 | Q | A | A | Q | Q | E | T | T | T | T | T | T | G |
| 264 | S | S | S | S | S | T | S | S | S | S | S | S | S |
| 265 | G | T | T | G | G | A | G | G | G | G | G | G | V |
| 266 | A | G | G | A | A | G | G | G | G | G | G | G | D |
| 267 | S | S | S | S | S | T | T | T | T | S | S | T | S |
| 268 | N | N | N | N | N | N | N | N | N | N | N | N | N |
| 271 | H | H | H | H | H | T | T | T | T | A | A | T | A |
| 382 | N | N | N | N | N | N | N | N | N | D | D | N | N |
| 383 | G | G | G | G | G | G | G | G | G | G | G | G | T |
| 384 | S | S | S | S | S | S | S | S | S | S | S | S | E |
| 385 | Q | Q | Q | Q | Q | Q | Q | Q | Q | Q | Q | Q | N |
| 446 | S | N | N | N | N | A | S | S | S | S | S | S | V |
| 471 | R | S | S | S | S | A | A | S | S | A | A | S | A |
| 502 | W | W | W | W | W | W | W | W | W | W | W | W | F |
| 503 | T | T | T | T | T | T | T | T | T | P | P | T | A |
| 528 | D | D | D | D | D | D | D | D | D | E | E | D | L |
| 529 | D | D | D | D | D | D | D | D | D | G | G | D | Q |
| 589 | Q | D | D | A | A | A | A | G | A | Q | Q | G | A |
| 706 | K | K | K | K | K | K | K | K | K | K | K | K | D |
| 708 | V | A | A | V | V | T | T | T | T | N | N | T | Q |

TABLE 1B

| Position | AAV2 | Anc80 | Anc81 | Anc82 | Anc83 | Anc84 | Anc94 | Anc110 | Anc113 | Anc126 | Anc127 |
|---|---|---|---|---|---|---|---|---|---|---|---|
| 263 | Q | Q | Q | T | T | T | T | T | Q | Q | Q |
| 264 | S | S | S | S | S | S | S | S | S | S | S |
| 265 | G | G | G | G | G | G | G | G | A | G | G |
| 266 | A | A | G | G | G | G | G | G | G | A | A |
| 267 | S | S | T | T | T | T | T | T | T | S | S |
| 268 | N | N | N | N | N | N | N | N | N | N | N |
| 271 | H | T | T | T | T | T | T | T | T | H | H |
| 382 | N | N | N | N | N | N | N | N | N | N | N |
| 383 | G | G | G | G | G | G | G | G | G | G | G |
| 384 | S | S | S | S | S | S | S | S | S | S | S |
| 385 | Q | Q | Q | Q | Q | Q | Q | Q | Q | Q | Q |
| 446 | S | S | S | S | S | S | S | S | A | S | S |
| 471 | R | A | A | A | A | S | S | A | A | A | A |
| 502 | W | W | W | W | W | W | W | W | W | W | W |
| 503 | T | T | T | T | T | T | T | T | T | T | T |
| 528 | D | D | D | D | D | D | D | D | D | D | D |
| 529 | D | D | D | D | D | D | D | D | D | D | D |
| 589 | Q | A | A | A | A | A | A | Q | A | A | A |
| 706 | K | K | K | K | K | K | K | K | K | K | K |
| 708 | V | T | T | T | T | T | T | T | T | A | V |

TABLE 1C

| Position | AAV2 | Anc80L27 | Anc80L59 | Anc80L60 | Anc80L62 | Anc80L65 | Anc80L33 | Anc80L36 | Anc80L44 | Anc80L1 |
|---|---|---|---|---|---|---|---|---|---|---|
| 263 | Q | Q | Q | Q | Q | Q | Q | Q | Q | Q |
| 264 | S | S | S | S | S | S | S | S | S | S |
| 265 | G | G | G | G | G | G | G | G | G | G |
| 266 | A | G | A | G | G | G | G | G | G | A |
| 267 | S | T | T | T | T | T | T | T | T | T |
| 268 | N | N | N | N | N | N | N | N | N | N |
| 271 | H | T | T | T | T | T | T | T | T | T |
| 382 | N | N | N | N | N | N | N | N | N | N |
| 383 | G | G | G | G | G | G | G | G | G | G |
| 384 | S | S | S | S | S | S | S | S | S | S |
| 385 | Q | Q | Q | Q | Q | Q | Q | Q | Q | Q |
| 446 | S | S | S | S | S | S | S | S | S | S |
| 471 | R | A | A | A | A | A | A | A | A | A |
| 502 | W | W | W | W | W | W | W | W | W | W |
| 503 | T | T | T | T | T | T | T | T | T | T |
| 528 | D | D | D | D | D | D | D | D | D | D |
| 529 | D | D | D | D | D | D | D | D | D | D |
| 589 | Q | A | A | A | A | A | A | A | A | A |
| 706 | K | K | K | K | K | K | K | K | K | K |
| 708 | V | T | T | T | T | T | T | T | T | T |

[0118] In some embodiments the means for altering rAAV biodistribution comprises one or more amino acid substitutions, insertions, and/or deletions at more than one of the toggle sites. In some embodiments the means for altering rAAV biodistribution comprises one or more amino acid substitution, insertion, and/or deletion at two of the toggle sites. In some embodiments the means for altering rAAV biodistribution comprises one or more amino acid substitution, insertion, and/or deletion at three of the toggle sites. In some embodiments the means for altering rAAV biodistribution comprises one or more amino acid substitution, insertion, and/or deletion at four, five, six, seven, eight, nine, ten, eleven, twelve, thirteen, fourteen, fifteen, sixteen, seventeen, eighteen, nineteen or twenty of the toggle sites. In some embodiments, the means for altering rAAV biodistribution comprises one or more amino acid substitution, insertion, and/or deletion at A2666 and one or more additional amino acid substitutions, insertion and/or deletion at other toggle sites—Q263, S264, G265, S267, N268, H271, N382, G383, S384, Q385, S446, R471, W502, T503, D528, D529, Q589, K706, and V708. In some embodiments, the means for altering rAAV biodistribution does not comprise an amino acid substitution at A266.

[0119] In some embodiments, the means for altering rAAV biodistribution comprises one or more amino acid substitutions at the selected toggle sites—S446, R471 and V708. In some embodiments, the means for altering rAAV biodistribution comprises two amino acid substitutions or three amino acid substitutions at the selected toggle sites. In some embodiments, the modified VP1 capsid protein comprises one, two or three amino acid residues selected from the group consisting of 446R, 471A and 708T. In some embodiments, the modified VP1 capsid protein comprises one, two or three amino acid residues selected from the group consisting of 446S, 471S and 708A.

[0120] In some embodiments, a modified AAV capsid protein differs from the unmodified AAV capsid protein having greatest sequence identity to the modified AAV capsid protein VP1 protein, as aligned using default parameters. In some embodiments, a modified AAV capsid protein differs from the unmodified AAV capsid protein with greatest sequence identity only at the toggle sites, Q263, S264, G265, A266, S267, N268, H271, N382, G383, S384, Q385, S446, R471, W502, T503, D528, D529, Q589, K706, and V708, wherein the amino acid position is numbered relative to SEQ ID NO: 1 (AAV2 VP1). In some embodiments, a modified AAV capsid protein differs from the unmodified AAV capsid protein with greatest sequence identity only at the selected toggle sites, S446, R471 and V708, wherein the amino acid position is numbered relative to SEQ ID NO: 1 (AAV2 VP1).

[0121] In some embodiments, a modified AAV capsid protein differs from the unmodified rAAV capsid protein with greatest sequence identity at the toggle sites as well as outside of the toggle sites. In some embodiments, a modified AAV capsid protein has 95%, 96%, 97%, 98%, 99% or 99.5% sequence identity to the unmodified AAV capsid protein with greatest sequence identity.

[0122] In one aspect, the present disclosure provides a modified polynucleotide encoding a modified AAV capsid protein. The modified polynucleotide encoding a modified AAV capsid protein can have one or more nucleotide substitution, insertion or deletion at one or more positions selected from the group consisting of (787-789), (790-792), (793-795), (796-798), (799-801), (802-804), (811-813), (1144-1146), (1150-1152), (1153-1155), (1336-1338), (1411-1413), (1504-1506), (1507-1509), (1582-1584), (1585-1587), (1765-1767), (2116-2118), or (2122-2124) compared to an unmodified polynucleotide encoding an unmodified AAV capsid, wherein the nucleotide position is numbered relative to SEQ ID NO: 152 (AAV2 VP1). The nucleotide substitution, insertion or deletion can introduce one or more amino acid substitution, insertion and/or deletion at one or more of the toggle sites—Q263, S264, G265, A266, S267, N268, H271, N382, G383, S384, Q385, S446, R471, W502, T503, D528, D529, Q589, K706, and V708 to the capsid protein encoded by the polynucleotide.

[0123] In some embodiments, the modified polynucleotide comprises one of the sequences shown in SEQ ID NO: 147-151 with one or more nucleotide substitution, insertion or deletion at one or more positions selected from the group consisting of (787-789), (790-792), (793-795), (796-798), (799-801), (802-804), (811-813), (1144-1146), (1150-1152), (1153-1155), (1336-1338), (1411-1413), (1504-1506), (1507-1509), (1582-1584), (1585-1587), (1765-1767), (2116-2118), or (2122-2124), wherein the nucleotide position is numbered relative to SEQ ID NO: 152 (AAV2 VP1).

[0124] In one aspect, the present disclosure provides a modified polynucleotide encoding a modified AAV capsid protein. The modified polynucleotide encoding a modified AAV capsid protein can have one or more nucleotide substitution, insertion or deletion at one or more positions selected from the group consisting of (1336-1338), (1411-1413) or (2122-2124) compared to an unmodified polynucleotide encoding an unmodified AAV capsid, wherein the nucleotide position is numbered relative to SEQ ID NO: 152 (AAV2 VP1). The nucleotide substitution, insertion or deletion can introduce one or more amino acid substitution, insertion and/or deletion at one or more of the selected toggle sites—S446, R471 and V708 to the capsid protein encoded by the polynucleotide. The nucleotide substitution, insertion or deletion can introduce one or more amino acid substitution, insertion and/or deletion at one or more of the selected toggle sites—A266, S446, R471 and V708.

[0125] In some embodiments, the modified polynucleotide comprises one of the sequences shown in SEQ ID NO: 147-151 with one or more nucleotide substitution, insertion or deletion at one or more positions selected from the group consisting of (1336-1338), (1411-1413) or (2122-2124), wherein the nucleotide position is numbered relative to SEQ ID NO: 152 (AAV2 VP1).

[0126] In another aspect, the present disclosure provides a vector comprising the modified polynucleotide encoding a modified AAV capsid protein described herein. In some embodiments, the vector is a plasmid.

Modified Recombinant AAV (Modified rAAV)

[0127] The present disclosure further provides modified rAAVs comprising a modified AAV capsid protein (VP1, VP2 or VP3 capsid protein) disclosed herein and a recombinant nucleic acid vector.

[0128] In some embodiments, the modified rAAV achieves higher transduction of liver following administration to a mammalian subject as compared to an unmodified rAAV comprising an unmodified VP1 capsid protein having greatest sequence identity to the modified VP1 administered by the same route of administration. In some embodiments, the modified rAAV achieves higher expression in liver of an expressible polynucleotide within the recombinant nucleic acid genome following administration to a mammalian subject as compared to expression of the expressible polynucleotide administered in an unmodified rAAV comprising a VP1 capsid protein having greatest sequence identity to the modified VP1, administered by the same route of administration.

[0129] In some embodiments, the modified rAAV achieves lower transduction of liver following administration to a mammalian subject as compared to an unmodified rAAV comprising a VP1 capsid protein having greatest sequence identity to the modified VP1, administered by the same route of administration. In some embodiments, the modified rAAV achieves lower expression in liver of an expressible polynucleotide within the recombinant nucleic acid genome following administration to a mammalian subject as compared to the expressible polynucleotide administered in an unmodified rAAV comprising a VP1 capsid protein having greatest sequence identity to the modified VP1 administered by the same route of administration.

[0130] In some embodiments, the modified rAAV achieves higher transduction of an organ outside of liver following administration to a mammalian subject as compared to an unmodified rAAV comprising an unmodified VP1 capsid protein having greatest sequence identity to the modified VP1, administered by the same route of administration. In some embodiments, the modified rAAV achieves higher expression in an organ outside of liver of an expressible polynucleotide within the recombinant nucleic acid genome as compared to the expressible polynucleotide delivered in an unmodified rAAV comprising an unmodified VP1 capsid protein having greatest sequence identity to the modified VP1 administered by the same route of administration.

[0131] In some embodiments, the modified rAAV achieves lower transduction of an organ outside of liver of an expressible polynucleotide within the recombinant nucleic acid genome as compared to the expressible polynucleotide delivered in an unmodified rAAV comprising an unmodified VP1 capsid protein having greatest sequence identity to the modified VP1 administered by the same route of administration. In some embodiments, the modified rAAV achieves lower expression in an organ outside of liver of an expressible polynucleotide within the recombinant nucleic acid genome following administration to a mammalian subject as compared to the expressible polynucleotide administered in an unmodified rAAV comprising a VP1 capsid protein having greatest sequence identity to the modified VP1 administered by the same route of administration.

[0132] In some embodiments, the modified rAAV has reduced interaction with AAVR expressed on the mammalian subject's cells as compared to an unmodified rAAV comprising an unmodified VP1 capsid protein having greatest sequence identity to the modified VP1 administered by the same route of administration. In some embodiments, the modified rAAV has greater interaction with AAVR expressed on the mammalian subject's cells as compared to an unmodified rAAV comprising an unmodified VP1 capsid protein having greatest sequence identity to the modified VP1 delivered by the same route of administration.

[0133] In some embodiments, the modified rAAV has less liver toxicity than an unmodified rAAV comprising an unmodified VP1 capsid protein having greatest sequence identity to the modified VP1 administered by the same route of administration and in the same dose.

Pharmaceutical Composition Comprising Modified rAAV

[0134] In one aspect, the present disclosure provides a pharmaceutical composition comprising a modified rAAV of the present disclosure and a pharmaceutically acceptable carrier. The modified rAAV comprises a modified AAV capsid protein as described herein and a recombinant nucleic acid vector containing an expressible polynucleotide.

[0135] The pharmaceutical composition can be used to deliver the recombinant nucleic acid vector to a target within a mammalian subject. When the pharmaceutical composition is administered, the modified rAAV can achieve a higher transduction of target cells following administration to a mammalian subject as compared to an unmodified rAAV comprising an unmodified VP1 capsid protein having greatest sequence identity to the modified VP1 administered by the same route of administration and in the same dose. In some embodiments, the modified rAAV achieves higher expression in target cells of an expressible polynucleotide within the recombinant nucleic acid genome following administration to a mammalian subject as compared to the expressible polynucleotide administered in an unmodified rAAV comprising a VP1 capsid protein having greatest sequence identity to the modified VP1 administered by the same route of administration and in the same dose.

[0136] Targeting of modified rAAVs can be tested in an experimental animal by measuring rAAV transduction or expression of an expressible polynucleotide. In some embodiments, targeting is measured in a non-human primate (NHP), mice, rats, birds, rabbits, guinea pigs, hamsters, farm animals (including pigs and sheep), dogs, or cats.

[0137] Targeting of modified rAAVs can be measured after systemic or local administration of rAAVs. In some embodiments, targeting of modified rAAVs is measured after intravenous infusion of rAAVs.

[0138] In some embodiments, the modified rAAV achieves 2-fold, 3-fold, 4-fold, 5-fold, 10-fold, 20-fold, 30-fold, 40-fold, 50-fold, 100-fold, 200-fold, 500-fold, 750-fold, 1000-fold, or 2500-fold reduction in gene transfer to the liver or in viral infection or transgene expression in liver cells after a first administration into a mammalian subject compared to an unmodified rAAV. In some embodiments, the modified rAAV achieves 2-fold, 3-fold, 4-fold, 5-fold, 10-fold, 20-fold, 30-fold, 40-fold, 50-fold, 100-fold, 200-fold, 500-fold, 750-fold, 1000-fold, or 2500-fold reduction in gene transfer to the liver or in viral infection or transgene expression in liver cells after a first administration into a rhesus macaque.

[0139] In some embodiments, the modified rAAV achieves at least 10-fold increase in gene transfer to the liver or in viral infection or transgene expression in liver cells after a first administration into a mammalian subject compared to an unmodified rAAV. In some embodiments, the modified rAAV achieves at least 10-fold increase in gene transfer to the liver or in viral infection or transgene expression in liver cells after a first administration into a rhesus macaque.

[0140] In some embodiments, the modified rAAV achieves at least 10-fold reduction in gene transfer to the liver or in viral infection or transgene expression in liver cells after a first administration into a mammalian subject compared to an unmodified rAAV. In some embodiments, the modified rAAV achieves at least 10-fold reduction in gene transfer to the liver or in viral infection or transgene expression in liver cells after a first administration into a rhesus macaque.

[0141] In some embodiments, the modified rAAV achieves at least 10-fold increase in gene transfer to the liver or in viral infection or transgene expression in liver cells after a first administration into a mammalian subject compared to an unmodified rAAV. In some embodiments, the modified rAAV achieves at least 10-fold increase in gene transfer to the liver or in viral infection or transgene expression in liver cells after a first administration into a rhesus macaque.

[0142] In some embodiments, the modified rAAV achieves at least 100-fold reduction in gene transfer to the liver or in viral infection or transgene expression in liver cells after a first administration into a mammalian subject compared to an unmodified rAAV. In some embodiments, the modified rAAV achieves at least 100-fold reduction in gene transfer to the liver or in viral infection or transgene expression in liver cells after a first administration into a rhesus macaque.

[0143] In some embodiments, the modified rAAV achieves at least 100-fold increase in gene transfer to the liver or in viral infection or transgene expression in liver cells after a first administration into a mammalian subject compared to an unmodified rAAV. In some embodiments, the modified rAAV achieves at least 100-fold increase in gene transfer to the liver or in viral infection or transgene expression in liver cells after a first administration into a rhesus macaque.

[0144] In some embodiments, the modified rAAV achieves at least 1000-fold reduction in gene transfer to the liver or in viral infection or transgene expression in liver cells after a first administration into a mammalian subject compared to an unmodified rAAV. In some embodiments, the modified rAAV achieves at least 1000-fold reduction in gene transfer to the liver or in viral infection or transgene expression in liver cells after a first administration into a rhesus macaque.

[0145] In some embodiments, the modified rAAV achieves at least 1000-fold increase in gene transfer to the liver or in viral infection or transgene expression in liver cells after a first administration into a mammalian subject compared to an unmodified rAAV. In some embodiments, the modified rAAV achieves at least 1000-fold increase in gene transfer to the liver or in viral infection or transgene expression in liver cells after a first administration into a rhesus macaque.

### Methods of Using Liver-Toggled Viruses

[0146] A non-naturally occurring, modified AAV virus as described herein (e.g., in which the VP1 capsid protein sequence is changed or engineered to exhibit the desired bio-distribution (e.g., liver-on or liver off)) can be used in a number of research and/or therapeutic applications. For example, a liver-on or liver-off virus can be used in human or animal medicine for gene therapy (e.g., in a vector or vector system for gene transfer) or for vaccination (e.g., for antigen presentation). More specifically, a liver-on or liver-off virus can be used for gene addition, gene augmentation, genetic delivery of a polypeptide therapeutic, genetic vaccination, gene silencing, genome editing, gene therapy, RNAi delivery, cDNA delivery, mRNA delivery, miRNA delivery, miRNA sponging, genetic immunization, optogenetic gene therapy, transgenesis, DNA vaccination, or DNA immunization of liver cells or non-liver cells.

[0147] A non-naturally occurring, modified AAV in which the sequence of the capsid protein has been changed to alter the bio-distribution of the AAV (e.g., the liver bio-distribution) can include a transgene (in cis or trans configuration with other viral sequences). A transgene can be, for example, a reporter gene (e.g., beta-lactamase, beta-galactosidase (LacZ), alkaline phosphatase, thymidine kinase, green fluorescent polypeptide (GFP), chloramphenicol acetyltransferase (CAT), or luciferase, or fusion polypeptides that include an antigen tag domain such as hemagglutinin or Myc), or a therapeutic gene (e.g., genes encoding hormones or receptors thereof, growth factors or receptors thereof, differentiation factors or receptors thereof, immune system regulators (e.g., cytokines and interleukins) or receptors thereof, enzymes, RNAs (e.g., inhibitory RNAs or catalytic RNAs), or target antigens (e.g., oncogenic antigens, autoimmune antigens)).

[0148] The particular transgene will be selected depending, at least in part, on the particular disease or deficiency being treated. Simply by way of example, gene transfer or gene therapy can be applied to the treatment of hemophilia, retinitis pigmentosa, cystic fibrosis, leber congenital amaurosis, lysosomal storage disorders, inborn errors of metabolism (e.g., inborn errors of amino acid metabolism including phenylketonuria, inborn errors of organic acid metabolism including propionic acidemia, inborn errors of fatty acid metabolism including medium-chain acyl-CoA dehydrogenase deficiency (MCAD)), cancer, achromatopsia, cone-rod dystrophies, macular degenerations (e.g., age-related macular degeneration), lipopolypeptide lipase deficiency, familial hypercholesterolemia, spinal muscular atrophy, Duchenne's muscular dystrophy, Alzheimer's disease, Parkinson's disease, obesity, inflammatory bowel disorder, diabetes, congestive heart failure, hypercholesterolemia, hearing loss, coronary heart disease, familial renal amyloidosis, Marfan's syndrome, fatal familial insomnia, Creutzfeldt-Jakob disease, sickle-cell disease, Huntington's disease, fronto-temporal lobar degeneration, Usher syndrome, lactose intolerance, lipid storage disorders (e.g., Niemann-Pick disease, type C), Batten disease, choroideremia, glycogen storage disease type II (Pompe disease), ataxia telangiectasia (Louis-Bar syndrome), congenital hypothyroidism, severe combined immunodeficiency (SCID), and/or amyotrophic lateral sclerosis (ALS). A transgene also can be, for example, an immunogen that is useful for immunizing a subject (e.g., a human, an animal (e.g., a companion animal, a farm animal, an endangered animal). For example, immunogens can be obtained from an organism (e.g., a pathogenic organism) or an immunogenic portion or component thereof (e.g., a toxin polypeptide or a by-product thereof). By way of example, pathogenic organisms from which immunogenic polypeptides can be obtained include viruses (e.g., picornavirus, enteroviruses, orthomyxovirus, reovirus, retrovirus), prokaryotes (e.g., Pneumococci, Staphylococci, Listeria, Pseudomonas), and eukaryotes (e.g., amebiasis, malaria, leishmaniasis, nematodes). It would be understood that the methods described herein and compositions produced by such methods are not to be limited by any particular transgene.

### Administration of AAV

[0149] A liver-on or a liver-off AAV vector, usually suspended in a physiologically compatible carrier, can be administered to a subject (e.g., a human or non-human mammal). Suitable carriers include saline, which may be formulated with a variety of buffering solutions (e.g., phosphate buffered saline), lactose, sucrose, calcium phosphate, gelatin, dextran, agar, pectin, and water. A viral vector typically is administered in sufficient amounts to transduce or infect the desired cells and to provide sufficient levels of gene transfer and expression to provide a therapeutic benefit without undue adverse effects. Conventional and pharmaceutically acceptable routes of administration include, but are not limited to, direct delivery to an organ such as, for example, the liver or lung, orally, intranasally, intratracheally, intrathecally, by inhalation, intravenously, intramuscularly, intraocularly, subcutaneously, intradermally, transmucosally, or by other routes of administration. Routes of administration can be combined, if desired.

[0150] The dose of a viral vector administered to a subject will depend primarily on factors such as the condition being treated, and the age, weight, and health of the subject. For example, a therapeutically effective dosage of a viral vector to be administered to a human subject generally is in the range of from about 0.1 ml to about 10 ml of a solution containing concentrations of from about 1×10e1 to 1×10e12 genome copies (GCs) of viruses (e.g., about 1×10e3 to 1×10e9 GCs). Transduction and/or expression of a transgene can be monitored at various time points following administration by DNA, RNA, or protein assays. In some instances, the levels of expression of the transgene can be monitored to determine the frequency and/or amount of dosage. Dosage regimens similar to those described for therapeutic purposes also may be utilized for immunization.

[0151] A second “corresponding” subject (e.g., mammalian subject), as used herein, refers to a subject that is the same type (e.g., species and, where applicable, breed or strain) as the first subject, and does not substantially differ from the first subject in AAV transduction.

[0152] In accordance with the present invention, there may be employed conventional molecular biology, microbiology, biochemical, and recombinant DNA techniques within the skill of the art. Such techniques are explained fully in the literature. The invention will be further described in the following examples, which do not limit the scope of the methods and compositions of matter described in the claims.

### EXAMPLES

### Example 1—the Anc AAV Capsid Libraries

[0153] Libraries of the AAV capsid were previously generated (referred to as Anc AAVs) based on ancestral sequence reconstruction. Anc AAVs approximate a putative ancestral state of an AAV phylogeny. This work was based on recreating ancestors along a putative phylogeny of the majority of known primate AAVs including AAV1, AAV2, AAV3, AAV6, AAV7, AAV8, and AAV9 (but not AAV4 or AAV5). This process inferred a probability score (posterior probability) to each of the 20 amino acids at each of the positions along the AAV capsid protein VP1. These approaches were described in Zinn et al. (2015, Cell Reports, 12(6):1056-68) and WO 2015/054653, and were used to generate two Anc libraries, referred to as Anc126 and Anc127.

[0154] These Anc126 and Anc127 variant libraries were constructed using molecular cloning and DNA synthesis in a pooled format, i.e., all variants of a particular library were parallel synthetized in the same receptacle. The design of this library plasmid was such that it encodes the viral capsid sequence within the AAV vector genome. In addition, the design of these libraries includes a short DNA identifier or barcode that allows for efficient and high throughput next generation sequencing (NGS) using short read NGS platforms such as those sold by Illumina. In the experiments outlined herein, each barcode identified a single AAV capsid variant and each capsid variant was identified by a unique barcode.

[0155] FIG. 1 illustrates a minimal design of a library construct for AAV variants within pooled barcoded library. Elements of an AAV library plasmid construct are AAV Inverted Terminal Repeat (ITR), one or more promoter(s) or poly adenylation signal(s) (polyA), which can be from AAV or heterologous to AAV, an AAV capsid variant open reading frame (ORF), and a barcode identifier for the capsid. It would be understood that variations on the construct shown in FIG. 1 are possible, such as the presence of the barcode outside of the expression cassette yet within the ITRs, one promoter driving the capsid gene and another a transcript with the barcode, and/or various elements for promoter(s) and polyA signal(s).

[0156] This pooled plasmid library was used to generate a viral vector library by transfection into HEK293 cells together with an adenoviral helper gene plasmid construct and a plasmid containing the AAV rep expression cassette. Importantly, this transfection was performed under low plasmid concentration conditions to maximize the degree of “self-packaging,” i.e., the packaging of a viral genome for a particular capsid within the capsid. The viral library was next assessed for its diversity using Illumina NGS with a focused sequencing of the barcoding region. This data provided a count for each barcode identified within the NGS sample of the viral library preparation and, thereby, gave a relative representation of the barcode (and hence capsid variant) diversity. NGS sequencing of the barcode indicated that both of the Anc126 and Anc127 libraries were sufficiently diverse and representative across the relevant positions of sequence variation.

### Example 2—Summary of Sequence Diversity Across the AAVR Footprint

[0157] FIG. 2 is an alignment of Anc126 (SEQ ID NO:99) and Anc127 (SEQ ID NO:100) capsid protein sequences relative to the AAV2 VP1 capsid protein sequence (SEQ ID NO:1) using the MUSCLE algorithm (Edgar, R. C. (2004) MUSCLE: multiple sequence alignment with high accuracy and high throughput Nucleic Acids Res. 32(5):1792-1797) with the following parameters: distance measure kmer6_6, clustering method UPGMB, tree rooting method pseudo, distance weighting CLUSTALW, anchor spacing 32, open gap penalty −1. The residues predicted to be located within the AAVR footprint are boxed. Additionally, Table 2 below provides each of the predicted AAVR footprint residues in AAV2 and the corresponding residue in Anc80, Anc126, and Anc127, with dots (“.”) representing conserved amino acids. Positions at which alternate residues were observed are shown in Table 2, indicating that these sites of variation were ambiguous in the Anc library.

TABLE 2
The residue and positions on the AAV VP1 capsid protein
predicted to be involved in AAVR-AAV binding

| Position | AAV2 | Anc80 | Anc126 | Anc127 |
|---|---|---|---|---|
| 263 | Q | . | . | . |
| 264 | S | . | . | . |
| 265 | G | . | . | . |
| 266 | A | A/G | . | . |
| 267 | S | . | . | . |
| 268 | N | . | . | . |
| 271 | H | T | . | . |
| 382 | N | . | . | . |
| 383 | G | . | . | . |
| 384 | S | . | . | . |
| 385 | Q | . | . | . |
| 446 | S | . | N/S | R/S |
| 471 | R | A | A/S | A/S |
| 502 | W | . | . | . |
| 503 | T | . | . | . |
| 528 | D | . | . | . |
| 529 | D | . | . | . |
| 589 | Q | A | A | A |
| 706 | K | . | . | . |
| 708 | V | T | T/A | . |

### Example 3—Identifying Sequences Associated with Liver Uptake

[0158] The AAV126 and AAV127 variant libraries were injected into C57Bl/6 mice via an intravenous route at a dose of 6.2e10 GCs total to interrogate the impact of the variant sites within the library on liver tropism, especially those sites identified in Table 2, which correspond to the AAVR footprint. Animals were sacrificed and tissues were harvested at 28 days following injection. Tissues were subjected to DNA isolation, after which the DNA samples were amplified using PCR with primers flanking the barcode sequence. PCR amplicons underwent a second amplification to incorporate Illumina NGS indexes. These NGS samples were subsequently sequenced using Illumina NGS instrumentation MiSeq® or NovaSeq®. Data was subsequently analyzed for each variant to represent enrichment of barcodes in liver as compared to the input injected virus using the barcode counts of the liver versus those in the input viral preparation. A quantitative readout of the liver tissue was obtained, which indicated the extent of liver distribution of each member of the respective library.

[0159] FIG. 3 and FIG. 4 represent the relative performance data in the liver for Anc126 and Anc127 members, respectively, as does FIGS. 5A and 5B. The analysis provided here, in the form of graphs referred to as a “fingerprint plots,” illustrates the performance for all members of the Anc126 or Anc127 vector libraries in rank order from top to bottom. In addition, columns represent the sites of variation within the Anc126 or Anc127 library design. Each site of variation is ambiguous, i.e., has two different residues that can be encoded in that position.

[0160] Data in FIG. 3 indicates that position P9, which corresponds to residue 708 in AAV2 (SEQ ID NO:1), is the only position in this list that overlaps with the AAVR footprint and that demonstrated an enrichment of white variants (a T at position 708) versus black variants (an A at position 708) in the liver. The black variants were underrepresented in the liver (34.8% of the top 256 performing variants), indicating that the T in position 708 of Anc126 enhanced liver targeting versus an A in the same position, which reduced liver targeting. Thus, A708 variants were less efficient in liver uptake compared to T708 variants.

[0161] Similarly, data in FIG. 4 indicates that position P5, which corresponds to residue 446 in AAV2 (SEQ ID NO:1), abuts the AAVR footprint and is one of two positions in this list that demonstrated an enrichment of white variants (R446) versus black variants (S446) in the liver. The white variants were underrepresented in the liver (23.6% of the top 512 performing variants), indicating that an R in position 446 of Anc127 enhanced liver targeting versus an S in the same position, which reduced liver targeting.

[0162] The data in FIGS. 5A and 5B indicate that position P8 in Anc126 and P7 in Anc127, which both align with residue 471 of AAV2 (SEQ ID NO:1), exhibit only a faint effect with changes at position 471, with viruses having an A471 sequence being slightly more likely to be liver targeted as compared to viruses having an S471 sequence. Since neither the white variants (A471) nor the black variants (S471) strongly determined liver enrichment, not every residue of the predicted AAVR footprint, when conservatively altered, significantly modulates the AAVR-AAV interaction. In addition, an A to S change is a relatively modest change, which also may lead to a less appreciable effect.

[0163] Collectively, these data support the discovery that modulation of AAV-AAVR binding alters the uptake by the liver and, by extension, other tissues. Specifically, this analysis indicates that positions 446, 471, and 708 within the AAVR footprint appear to be involved in the bio-distribution of AAV to, or away from, the liver.

### Example 4—Use of an Exemplary Liver Toggle in Non-Human Primates

[0164] The AAVAnc80, Anc81, Anc110, and Anc126 variant libraries were injected into the cerebrospinal fluid of two female rhesus macaques (m. mulatta) via an intracisternal route at a dose of 7.75e10 GC/kg to interrogate the impact of the variant sites within the library on CNS, systemic escape, and liver tropism. Animals were sacrificed and tissues were harvested at 7 days following injection. Tissues were subjected to DNA isolation, after which the DNA samples were amplified using PCR with primers flanking the barcode sequence. PCR amplicons underwent a second amplification to incorporate Illumina NGS indexes. These NGS samples were sequenced using Illumina NGS instrumentation MiSeq® or NovaSeq®. Data was subsequently analyzed for each variant to represent enrichment of barcodes in liver as compared to the input injected virus using the barcode counts of the liver versus those in the input viral preparation. A quantitative readout of the liver tissue was obtained, which indicated the extent of liver distribution of each member of the respective library.

[0165] FIGS. 6A and 6B represent the relative performance data in the liver for Anc80 library. The analysis provided here, in the form of graphs referred to as a “fingerprint plots,” illustrates the performance for all members of the Anc80 vector library in rank order from top to bottom. In addition, columns represent the sites of variation within the Anc80 library design. Each site of variation is ambiguous, i.e., has two different residues that can be encoded in that position.

[0166] Data in FIGS. 6A and 6B indicate that position P3, which corresponds to residue 266 in AAV2 (SEQ ID NO:1), is the only position in this list that overlaps with the AAVR footprint and that demonstrated an enrichment of black variants (a G at position 266) versus white variants (an A at position 266) in the liver. The white variants were underrepresented in the liver (6.7% of the top 1024 performing variants), indicating that the G in position 266 of Anc80 enhanced liver targeting versus an A in the same position, which reduced liver targeting. Thus, A266 variants were less efficient in liver uptake compared to G266 variants.

[0167] Collectively, these data support the discovery that modulation of AAV-AAVR binding alters the uptake by the liver and, by extension, other tissues. Specifically, this analysis indicates that positions 266, 446, 471, and 708 within the AAVR footprint appear to be involved in the bio-distribution of AAV to, or away from, the liver.

### Other Embodiments

[0168] It is to be understood that, while the methods and compositions of matter have been described herein in conjunction with a number of different aspects, the foregoing description of the various aspects is intended to illustrate and not limit the scope of the methods and compositions of matter. Other aspects, advantages, and modifications are within the scope of the following claims.

[0169] Disclosed are methods and compositions that can be used for, can be used in conjunction with, can be used in preparation for, or are products of the disclosed methods and compositions. These and other materials are disclosed herein, and it is understood that combinations, subsets, interactions, groups, etc. of these methods and compositions are disclosed. That is, while specific reference to each various individual and collective combinations and permutations of these compositions and methods may not be explicitly disclosed, each is specifically contemplated and described herein. For example, if a particular composition of matter or a particular method is disclosed and discussed and a number of compositions or methods are discussed, each and every combination and permutation of the compositions and the methods are specifically contemplated unless specifically indicated to the contrary. Likewise, any subset or combination of these is also specifically contemplated and disclosed.

APPENDIX
X(#) refers to one or more amino acid residues, as indicated, for
the given toggle site.
(VP1 capsid protein of AAV2 and modifications thereof)
SEQ ID NO: 112
MAADGYLPDWLEDTLSEGIRQWWKLKPGPPPPKPAERHKDDSRGLVLPGYKYLGPENGLDKGEPV
NEADAAALEHDKAYDRQLDSGDNPYLKYNHADAEFQERLKEDTSFGGNLGRAVFQAKKRVLEPLG
LVEEPVKTAPGKKRPVEHSPVEPDSSSGTGKAGQQPARKRLNFGQTGDADSVPDPQPLGQPPAAP
SGLGTNTMATGSGAPMADNNEGADGVGNSSGNWHCDSTWMGDRVITTSTRTWALPTYNNHLYKQI
SSX1X2X3X4X5X6DNX7YFGYSTPWGYFDENRFHCHESPRDWQRLINNNWGFRPKRLNFKLFNI
QVKEVTQNDGTTTIANNLTSTVQVFTDSEYQLPYVLGSAHQGCLPPFPADVFMVPQYGYLTLNX8
X9X10X11AVGRSSFYCLEYFPSQMLRTGNNFTFSYTFEDVPFHSSYAHSQSLDRLMNPLIDQYL
YYLX12RTNTPSGTTTQSRLQFSQAGASDIX13DQSRNWLPGPCYRQQRVSKTSADNNNSEYSX1
4X15GATKYHLNGRDSLVNPGPAMASHKX16X17EEKFFPQSGVLIFGKQGSEKTNVDIEKVMIT
DEEEIRTTNPVATEQYGSVSTNLQRGNRX18AATADVNTQGVLPGMVWQDRDVYLQGPIWAKIPH
TDGHFHPSPLMGGFGLKHPPPQILIKNTPVPANPSTTFSAAKFASFITQYSTGQVSVEIEWELQK
ENSKRWNPEIQYTSNYNX19SX20NVDFTVDINGVYSEPRPIGTRYLTRNL
X1 = Q/A/E/T/G; X2 = G/T/A/V/S; X3 = G/T/A/V; X4 = A/G/D; X5 = S/T; X6 = N;
X7 = H/T/A; X8 = N/D; X9 = G/T; X10 = S/E; X11 = Q/N; X12 = S/N/A/V/R;
X13 = R/S/A; X14 = W/F; X15 = T/P/A; X16 = D/E/L; X17 = D/G/Q; X18 = Q/D/A/G;
X19 = K/D; X20 = V/A/T/N/Q
(VP1 capsid protein of AAV1 and modifications thereof)
SEQ ID NO: 113
AADGYLPDWLEDNLSEGIREWWDLKPGAPKPKANQQKQDDGRGLVLPGYKYLGPENGLDKGEPVN
AADAAALEHDKAYDQQLKAGDNPYLRYNHADAEFQERLQEDTSFGGNLGRAVEQAKKRVLEPLGL
VEEGAKTAPGKKRPVEQSPQEPDSSSGIGKTGQQPAKKRLNFGQTGDSESVPDPQPLGEPPATPA
AVGPTTMASGGGAPMADNNEGADGVGNASGNWHCDSTWLGDRVITTSTRTWALPTYNNHLYKQIS
SX1X2X3X4X5X6DNX7YFGYSTPWGYFDFNRFHCHFSPRDWQRLINNNWGFRPKRLNFKLENIQ
VKEVTTNDGVTTIANNLTSTVQVESDSEYQLPYVLGSAHQGCLPPFPADVEMIPQYGYLTLNX8X
9X10X11AVGRSSFYCLEYFPSQMLRTGNNFTESYTFEEVPFHSSYAHSQSLDRLMNPLIDQYLY
YLX12RTQNQSGSAQNKDLLFSRGSPAGMX13VQPKNWLPGPCYRQQRVSKTKTDNNNSNFTX14
X15GASKYNLNGRESIINPGTAMASHKX16X17EDKFFPMSGVMIFGKESAGASNTALDNVMITD
EEEIKATNPVATERFGTVAVNFQSSSTX18PATGDVHAMGALPGMVWQDRDVYLQGPIWAKIPHT
DGHFHPSPLMGGFGLKNPPPQILIKNTPVPANPPAEFSATKFASFITQYSTGQVSVEIEWELQKE
NSKRWNPEVQYTSNYAX19SX20NVDFTVDNNGLYTEPRPIGTRYLTRPL
X1 = Q/A/E/T/G; X2 = G/T/A/V/S; X3 = G/T/A/V; X4 = A/G/D; X5 = S/T; X6 = N;
X7 = H/T/A; X8 = N/D; X9 = G/T; X10 = S/E; X11 = Q/N; X12 = S/N/A/V/R;
X13 = R/S/A; X14 = W/F; X15 = T/P/A; X16 = D/E/L; X17 = D/G/Q; X18 = Q/D/A/G;
X19 = K/D; X20 = V/A/T/N/Q
(VP1 capsid protein of AAV6 and modifications thereof)
SEQ ID NO: 114
MAADGYLPDWLEDNLSEGIREWWDLKPGAPKPKANQQKQDDGRGLVLPGYKYLGPENGLDKGEPV
NAADAAALEHDKAYDQQLKAGDNPYLRYNHADAEFQERLQEDTSFGGNLGRAVFQAKKRVLEPFG
LVEEGAKTAPGKKRPVEQSPQEPDSSSGIGKTGQQPAKKRLNFGQTGDSESVPDPQPLGEPPATP
AAVGPTTMASGGGAPMADNNEGADGVGNASGNWHCDSTWLGDRVITTSTRTWALPTYNNHLYKQI
SSX1X2X3X4X5X6DNX7YFGYSTPWGYFDENRFHCHESPRDWQRLINNNWGFRPKRLNEKLENI
QVKEVTTNDGVTTIANNLTSTVQVFSDSEYQLPYVLGSAHQGCLPPFPADVEMIPQYGYLTLNX8
X9X10X11AVGRSSFYCLEYFPSQMLRTGNNFTFSYTFEDVPFHSSYAHSQSLDRLMNPLIDQYL
YYLX12RTQNQSGSAQNKDLLFSRGSPAGMX13VQPKNWLPGPCYRQQRVSKTKTDNNNSNFTX1
4X15GASKYNLNGRESIINPGTAMASHKX16X17KDKFFPMSGVMIFGKESAGASNTALDNVMIT
DEEEIKATNPVATERFGTVAVNLQSSSTX18PATGDVHVMGALPGMVWQDRDVYLQGPIWAKIPH
TDGHFHPSPLMGGFGLKHPPPQILIKNTPVPANPPAEFSATKFASFITQYSTGQVSVEIEWELQK
ENSKRWNPEVQYTSNYAX19SX20NVDFTVDNNGLYTEPRPIGTRYLTRPL
X1 = Q/A/E/T/G; X2 = G/T/A/V/S; X3 = G/T/A/V; X4 = A/G/D; X5 = S/T; X6 = N;
X7 = H/T/A; X8 = N/D; X9 = G/T; X10 = S/E; X11 = Q/N; X12 = S/N/A/V/R;
X13 = R/S/A; X14 = W/F; X15 = T/P/A; X16 = D/E/L; X17 = D/G/Q; X18 = Q/D/A/G;
X19 = K/D; X20 = V/A/T/N/Q
(VP1 capsid protein of AAV3 and modifications thereof)
SEQ ID NO: 115
MAADGYLPDWLEDNLSEGIREWWALKPGVPQPKANQQHQDNRRGLVLPGYKYLGPGNGLDKGEPV
NEADAAALEHDKAYDQQLKAGDNPYLKYNHADAEFQERLQEDTSEGGNLGRAVFQAKKRILEPLG
LVEEAAKTAPGKKGAVDQSPQEPDSSSGVGKSGKQPARKRLNFGQTGDSESVPDPQPLGEPPAAP
TSLGSNTMASGGGAPMADNNEGADGVGNSSGNWHCDSQWLGDRVITTSTRTWALPTYNNHLYKQI
SSX1X2X3X4X5X6DNX7YFGYSTPWGYFDENRFHCHESPRDWQRLINNNWGFRPKKLSFKLENI
QVRGVTQNDGTTTIANNLTSTVQVFTDSEYQLPYVLGSAHQGCLPPFPADVEMVPQYGYLTLNX8
X9X10X11AVGRSSFYCLEYFPSQMLRTGNNFQFSYTFEDVPFHSSYAHSQSLDRLMNPLIDQYL
YYLX12RTQGTTSGTTNQSRLLFSQAGPQSMX13LQARNWLPGPCYRQQRLSKTANDNNNSNFPX
14X15AASKYHLNGRDSLVNPGPAMASHKX16X17EEKFFPMHGNLIFGKEGTTASNAELDNVMI
TDEEEIRTTNPVATEQYGTVANNLQSSNTX18PTTGTVNHQGALPGMVWQDRDVYLQGPIWAKIP
HTDGHFHPSPLMGGFGLKHPPPQIMIKNTPVPANPPTTFSPAKFASFITQYSTGQVSVEIEWELQ
KENSKRWNPEIQYTSNYNX19SX20NVDFTVDINGVYSEPRPIGTRYLTRNL
X1 = Q/A/E/T/G; X2 = G/T/A/V/S; X3 = G/T/A/V; X4 = A/G/D; X5 = S/T; X6 = N;
X7 = H/T/A; X8 = N/D; X9 = G/T; X10 = S/E; X11 = Q/N; X12 = S/N/A/V/R;
X13 = R/S/A; X14 = W/F; X15 = T/P/A; X16 = D/E/L; X17 = D/G/Q; X18 = Q/D/A/G;
X19 = K/D; X20 = V/A/T/N/Q
(VP1 capsid protein of AAV LK03 and modifications thereof)
SEQ ID NO: 116
MAADGYLPDWLEDNLSEGIREWWALQPGAPKPKANQQHQDNARGLVLPGYKYLGPGNGLDKGEPV
NAADAAALEHDKAYDQQLKAGDNPYLKYNHADAEFQERLKEDTSFGGNLGRAVEQAKKRLLEPLG
LVEEAAKTAPGKKRPVDQSPQEPDSSSGVGKSGKQPARKRLNFGQTGDSESVPDPQPLGEPPAAP
TSLGSNTMASGGGAPMADNNEGADGVGNSSGNWHCDSQWLGDRVITTSTRTWALPTYNNHLYKQI
SSX1X2X3X4X5X6DNX7YFGYSTPWGYFDENRFHCHFSPRDWQRLINNNWGERPKKLSFKLENI
QVKEVTQNDGTTTIANNLTSTVQVFTDSEYQLPYVLGSAHQGCLPPFPADVEMVPQYGYLTLNX8
X9X10X11AVGRSSFYCLEYFPSQMLRTGNNFQFSYTFEDVPFHSSYAHSQSLDRLMNPLIDQYL
YYLX12RTQGTTSGTTNQSRLLFSQAGPQSMX13LQARNWLPGPCYRQQRLSKTANDNNNSNFPX
14X15AASKYHLNGRDSLVNPGPAMASHKX16X17EEKFFPMHGNLIFGKEGTTASNAELDNVMI
TDEEEIRTTNPVATEQYGTVANNLQSSNTX18PTTRTVNDQGALPGMVWQDRDVYLQGPIWAKIP
HTDGHFHPSPLMGGFGLKHPPPQIMIKNTPVPANPPTTFSPAKFASFITQYSTGQVSVEIEWELQ
KENSKRWNPEIQYTSNYNX19SX20NVDETVDINGVYSEPRPIGTRYLTRPL
X1 = Q/A/E/T/G; X2 = G/T/A/V/S; X3 = G/T/A/V; X4 = A/G/D; X5 = S/T; X6 = N;
X7 = H/T/A; X8 = N/D; X9 = G/T; X10 = S/E; X11 = Q/N; X12 = S/N/A/V/R;
X13 = R/S/A; X14 = W/F; X15 = T/P/A; X16 = D/E/L; X17 = D/G/Q; X18 = Q/D/A/G;
X19 = K/D; X20 = V/A/T/N/Q
(VP1 capsid protein of AAV7 and modifications thereof)
SEQ ID NO: 117
MAADGYLPDWLEDNLSEGIREWWDLKPGAPKPKANQQKQDNGRGLVLPGYKYLGPENGLDKGEPV
NAADAAALEHDKAYDQQLKAGDNPYLRYNHADAEFQERLQEDTSFGGNLGRAVFQAKKRVLEPLG
LVEEGAKTAPAKKRPVEPSPQRSPDSSTGIGKKGQQPARKRLNFGQTGDSESVPDPQPLGEPPAA
PSSVGSGTVAAGGGAPMADNNEGADGVGNASGNWHCDSTWLGDRVITTSTRTWALPTYNNHLYKQ
ISSX1X2X3X4X5X6DNX7YFGYSTPWGYFDENRFHCHFSPRDWORLINNNWGFRPKKLRFKLEN
IQVKEVTTNDGVTTIANNLTSTIQVFSDSEYQLPYVLGSAHQGCLPPFPADVFMIPQYGYLTLNX
8X9X10X11SVGRSSFYCLEYFPSQMLRTGNNFEFSYSFEDVPFHSSYAHSQSLDRLMNPLIDQY
LYYLX12RTQSNPGGTAGNRELQFYQGGPSTMX13EQAKNWLPGPCFRQQRVSKTLDQNNNSNFA
X14X15GATKYHLNGRNSLVNPGVAMATHKX16X17EDRFFPSSGVLIFGKTGATNKTTLENVLM
TNEEEIRPTNPVATEEYGIVSSNLQAANTX18AQTQVVNNQGALPGMVWQNRDVYLQGPIWAKIP
HTDGNFHPSPLMGGFGLKHPPPQILIKNTPVPANPPEVETPAKFASFITQYSTGQVSVEIEWELQ
KENSKRWNPEIQYTSNFEX19QX20GVDFAVDSQGVYSEPRPIGTRYLTRNL
X1 = Q/A/E/T/G; X2 = G/T/A/V/S; X3 = G/T/A/V; X4 = A/G/D; X5 = S/T; X6 = N;
X7 = H/T/A; X8 = N/D; X9 = G/T; X10 = S/E; X11 = Q/N; X12 = S/N/A/V/R;
X13 = R/S/A; X14 = W/F; X15 = T/P/A; X16 = D/E/L; X17 = D/G/Q; X18 = Q/D/A/G;
X19 = K/D; X20 = V/A/T/N/Q
(VP1 capsid protein of AAV8 and modifications thereof)
SEQ ID NO: 118
AADGYLPDWLEDNLSEGIREWWALKPGAPKPKANQQKODDGRGLVLPGYKYLGPENGLDKGEPVN
AADAAALEHDKAYDQQLQAGDNPYLRYNHADAEFQERLQEDTSFGGNLGRAVEQAKKRVLEPLGL
VEEGAKTAPGKKRPVEPSPQRSPDSSTGIGKKGQQPARKRLNFGQTGDSESVPDPQPLGEPPAAP
SGVGPNTMAAGGGAPMADNNEGADGVGSSSGNWHCDSTWLGDRVITTSTRTWALPTYNNHLYKQI
SNX1X2X3X4X5X6DNX7YFGYSTPWGYFDENRFHCHFSPRDWORLINNNWGFRPKRLSFKLENI
QVKEVTQNEGTKTIANNLTSTIQVFTDSEYQLPYVLGSAHQGCLPPFPADVEMIPQYGYLTLNX8
X9X10X11AVGRSSFYCLEYFPSQMLRTGNNFQFTYTFEDVPFHSSYAHSQSLDRLMNPLIDQYL
YYLX12RTQTTGGTANTQTLGFSQGGPNTMX13NQAKNWLPGPCYRQQRVSTTTGQNNNSNFAX1
4X15AGTKYHLNGRNSLANPGIAMATHKX16X17EERFFPSNGILIFGKQNAARDNADYSDVMLT
SEEEIKTTNPVATEEYGIVADNLQQQNTX18PQIGTVNSQGALPGMVWQNRDVYLQGPIWAKIPH
TDGNFHPSPLMGGFGLKHPPPQILIKNTPVPADPPTTENQSKLNSFITQYSTGQVSVEIEWELQK
ENSKRWNPEIQYTSNYYX19SX20SVDFAVNTEGVYSEPRPIGTRYLTRNL
X1 = Q/A/E/T/G; X2 = G/T/A/V/S; X3 = G/T/A/V; X4 = A/G/D; X5 = S/T; X6 = N;
X7 = H/T/A; X8 = N/D; X9 = G/T; X10 = S/E; X11 = Q/N; X12 = S/N/A/V/R;
X13 = R/S/A; X14 = W/F; X15 = T/P/A; X16 = D/E/L; X17 = D/G/Q; X18 = Q/D/A/G;
X19 = K/D; X20 = V/A/T/N/Q
(VP1 capsid protein of AAV hu. 37 and modifications thereof)
SEQ ID NO: 119
MAADGYLPDWLEDNLSEGIREWWDLKPGAPKPKANQQKQDDGRGLVLPGYKYLGPENGLDKGEPV
NAADAAALEHDKAYDQQLKAGDNPYLRYNHADAEFQERLQEDTSEGGNLGRAVFQAKKRVLEPLG
LVEEAAKTAPGKKRPVEPSPQRSPDSSTGIGKKGQQPAKKRLNFGQTGDSESVPDPQPIGEPPAG
PSGLGSGTMAAGGGAPMADNNEGADGVGSSSGNWHCDSTWLGDRVITTSTRTWALPTYNNHLYKQ
ISNX1X2X3X4X5X6DNX7YFGYSTPWGYFDENRFHCHFSPRDWORLINNNWGFRPKRLSFKLEN
IQVKEVTQNEGTKTIANNLTSTIQVFTDSEYQLPYVLGSAHQGCLPPFPADVEMIPQYGYLTLNX
8X9X10X11AVGRSSFYCLEYFPSQMLRTGNNFEFSYTFEDVPFHSSYAHSQSLDRLMNPLIDQY
LYYLX12RTQSTGGTQGTQQLLFSQAGPANMX13AQAKNWLPGPCYRQQRVSTTLSQNNNSNFAX
14X15GATKYHLNGRDSLVNPGVAMATHKX16X17EERFFPSSGVLMFGKQGAGRDNVDYSSVML
TSEEEIKTTNPVATEQYGVVADNLQQTNTX18PIVGNVNSQGALPGMVWQNRDVYLQGPIWAKIP
HTDGNFHPSPLMGGFGLKHPPPQILIKNTPVPADPPTTESQAKLASFITQYSTGQVSVEIEWELQ
KENSKRWNPEIQYTSNYYX19SX20NVDFAVNTEGTYSEPRPIGTRYLTRNL
X1 = Q/A/E/T/G; X2 = G/T/A/V/S; X3 = G/T/A/V; X4-A/G/D; X5 = S/T; X6 = N;
X7 = H/T/A; X8 = N/D; X9 = G/T; X10 = S/E; X11 = Q/N; X12 = S/N/A/V/R;
X13 = R/S/A; X14 = W/F; X15 = T/P/A; X16 = D/E/L; X17 = D/G/Q; X18 = Q/D/A/G;
X19 = K/D; X20 = V/A/T/N/Q
(VP1 capsid protein of AAV rh. 10 and modifications thereof)
SEQ ID NO: 120
MAADGYLPDWLEDNLSEGIREWWDLKPGAPKPKANQQKQDDGRGLVLPGYKYLGPENGLDKGEPV
NAADAAALEHDKAYDQQLKAGDNPYLRYNHADAEFQERLQEDTSFGGNLGRAVFQAKKRVLEPLG
LVEEGAKTAPGKKRPVEPSPQRSPDSSTGIGKKGQQPAKKRLNFGQTGDSESVPDPQPIGEPPAG
PSGLGSGTMAAGGGAPMADNNEGADGVGSSSGNWHCDSTWLGDRVITTSTRTWALPTYNNHLYKQ
ISNX1X2X3X4X5X6DNX7YFGYSTPWGYFDENRFHCHESPRDWQRLINNNWGFRPKRLNFKLEN
IQVKEVTQNEGTKTIANNLTSTIQVFTDSEYQLPYVLGSAHQGCLPPFPADVEMIPQYGYLTLNX
8X9X10X11AVGRSSFYCLEYFPSQMLRTGNNFEFSYQFEDVPFHSSYAHSQSLDRLMNPLIDQY
LYYLX12RTQSTGGTAGTQQLLFSQAGPNNMX13AQAKNWLPGPCYRQQRVSTTLSONNNSNFAX
14X15GATKYHLNGRDSLVNPGVAMATHKX16X17EERFFPSSGVLMFGKQGAGKDNVDYSSVML
TSEEEIKTTNPVATEQYGVVADNLQQQNAX18PIVGAVNSQGALPGMVWQNRDVYLQGPIWAKIP
HTDGNFHPSPLMGGFGLKHPPPQILIKNTPVPADPPTTESQAKLASFITQYSTGQVSVEIEWELQ
KENSKRWNPEIQYTSNYYX19SX20NVDFAVNTDGTYSEPRPIGTRYLTRNL
X1 = Q/A/E/T/G; X2 = G/T/A/V/S; X3 = G/T/A/V; X4 = A/G/D; X5 = S/T; X6 = N;
X7 = H/T/A; X8 = N/D; X9 = G/T; X10 = S/E; X11 = Q/N; X12 = S/N/A/V/R;
X13 = R/S/A; X14 = W/F; X15 = T/P/A; X16 = D/E/L; X17 = D/G/Q; X18 = Q/D/A/G;
X19 = K/D; X20 = V/A/T/N/Q
(VP1 capsid protein of AA9 and modifications thereof)
SEQ ID NO: 121
MAADGYLPDWLEDNLSEGIREWWALKPGAPQPKANQQHQDNARGLVLPGYKYLGPGNGLDKGEPV
NAADAAALEHDKAYDQQLKAGDNPYLKYNHADAEFQERLKEDTSFGGNLGRAVFQAKKRLLEPLG
LVEEAAKTAPGKKRPVEQSPQEPDSSAGIGKSGAQPAKKRLNFGQTGDTESVPDPQPIGEPPAAP
SGVGSLTMASGGGAPVADNNEGADGVGSSSGNWHCDSQWLGDRVITTSTRTWALPTYNNHLYKQI
SNX1X2X3X4X5X6DNX7YFGYSTPWGYFDENRFHCHFSPRDWQRLINNNWGFRPKRLNEKLENI
QVKEVTDNNGVKTIANNLTSTVQVFTDSDYQLPYVLGSAHEGCLPPFPADVFMIPQYGYLTLNX8
X9X10X11AVGRSSFYCLEYFPSQMLRTGNNFQFSYEFENVPFHSSYAHSQSLDRLMNPLIDQYL
YYLX12KTINGSGQNQQTLKFSVAGPSNMX13VQGRNYIPGPSYRQQRVSTTVTQNNNSEFAX14
X15GASSWALNGRNSLMNPGPAMASHKX16X17EDRFFPLSGSLIFGKQGTGRDNVDADKVMITN
EEEIKTTNPVATESYGQVATNHQSAQAX18AQTGWVQNQGILPGMVWQDRDVYLQGPIWAKIPHT
DGNFHPSPLMGGFGMKHPPPQILIKNTPVPADPPTAFNKDKLNSFITQYSTGQVSVEIEWELQKE
NSKRWNPEIQYTSNYYX19SX20NVEFAVNTEGVYSEPRPIGTRYLTRNL
X1 = Q/A/E/T/G; X2 = G/T/A/V/S; X3 = G/T/A/V; X4 = A/G/D; X5 = S/T; X6 = N;
X7 = H/T/A; X8 = N/D; X9 = G/T; X10 = S/E; X11 = Q/N; X12 = S/N/A/V/R;
X13 = R/S/A; X14 = W/F; X15 = T/P/A; X16 = D/E/L; X17 = D/G/Q; X18 = Q/D/A/G;
X19 = K/D; X20 = V/A/T/N/Q
(VP1 capsid protein of hu68 and modifications thereof)
SEQ ID NO: 122
MAADGYLPDWLEDNLSEGIREWWALKPGAPQPKANQQHQDNARGLVLPGYKYLGPGNGLDKGEPV
NEADAAALEHDKAYDQQLKAGDNPYLKYNHADAEFQERLKEDTSFGGNLGRAVFQAKKRLLEPLG
LVEEAAKTAPGKKRPVEQSPQEPDSSVGIGKSGAQPAKKRLNFGQTGDTESVPDPQPIGEPPAAP
SGVGSLTMASGGGAPVADNNEGADGVGSSSGNWHCDSQWLGDRVITTSTRTWALPTYNNHLYKQI
SNX1X2X3X4X5X6DNX7YFGYSTPWGYFDENRFHCHFSPRDWQRLINNNWGFRPKRLNFKLENI
QVKEVTDNNGVKTIANNLTSTVQVFTDSDYQLPYVLGSAHEGCLPPFPADVEMIPQYGYLTLNX8
X9X10X11AVGRSSFYCLEYFPSQMLRTGNNFQFSYEFENVPFHSSYAHSQSLDRLMNPLIDQYL
YYLX12KTINGSGQNQQTLKFSVAGPSNMX13VQGRNYIPGPSYRQQRVSTTVTQNNNSEFAX14
X15GASSWALNGRNSLMNPGPAMASHKX16X17EDRFFPLSGSLIFGKQGTGRDNVDADKVMITN
EEEIKTTNPVATESYGQVATNHQSAQAX18AQTGWVQNQGILPGMVWQDRDVYLQGPIWAKIPHT
DGNFHPSPLMGGFGMKHPPPQILIKNTPVPADPPTAFNKDKLNSFITQYSTGQVSVEIEWELQKE
NSKRWNPEIQYTSNYYX19SX2ONVEFAVNTEGVYSEPRPIGTRYLTRNL
X1 = Q/A/E/T/G; X2 = G/T/A/V/S; X3 = G/T/A/V; X4 = A/G/D; X5 = S/T; X6 = N;
X7 = H/T/A; X8 = N/D; X9 = G/T; X10 = S/E; X11 = Q/N; X12 = S/N/A/V/R;
X13 = R/S/A; X14 = W/F; X15 = T/P/A; X16 = D/E/L; X17 = D/G/Q; X18 = Q/D/A/G;
X19 = K/D; X20 = V/A/T/N/Q
(VP1 capsid protein of AAV10 and modifications thereof)
SEQ ID NO: 123
MAADGYLPDWLEDNLSEGIREWWDLKPGAPKPKANQQKQDDGRGLVLPGYKYLGPENGLDKGEPV
NAADAAALEHDKAYDQQLKAGDNPYLRYNHADAEFQERLQEDTSEGGNLGRAVEQAKKRVLEPLG
LVEEAAKTAPGKKRPVEPSPQRSPDSSTGIGKKGQQPAKKRLNFGQTGESESVPDPQPIGEPPAG
PSGLGSGTMAAGGGAPMADNNEGADGVGSSSGNWHCDSTWLGDRVITTSTRTWALPTYNNHLYKQ
ISNX1X2X3X4X5X6DNX7YFGYSTPWGYFDENRFHCHESPRDWQRLINNNWGFRPKRLSFKLEN
IQVKEVTQNEGTKTIANNLTSTIQVFTDSEYQLPYVLGSAHQGCLPPFPADVEMIPQYGYLTLNX
8X9X10X11AVGRSSFYCLEYFPSQMLRTGNNFEFSYTFEDVPFHSSYAHSQSLDRLMNPLIDQY
LYYLX12RTQSTGGTQGTQQLLFSQAGPANMX13AQAKNWLPGPCYRQQRVSTTLSQNNNSNFAX
14X15GATKYHLNGRDSLVNPGVAMATHKX16X17EERFFPSSGVLMFGKQGAGRDNVDYSSVML
TSEEEIKTTNPVATEQYGVVADNLQQANTX18PIVGNVNSQGALPGMVWQNRDVYLQGPIWAKIP
HTDGNFHPSPLMGGFGLKHPPPQILIKNTPVPADPPTTESQAKLASFITQYSTGQVSVEIEWELQ
KENSKRWNPEIQYTSNYYX19SX20NVDFAVNTEGTYSEPRPIGTRYLTRNL
X1 = Q/A/E/T/G; X2 = G/T/A/V/S; X3 = G/T/A/V; X4-A/G/D; X5 = S/T; X6 = N;
X7 = H/T/A; X8 = N/D; X9 = G/T; X10 = S/E; X11 = Q/N; X12 = S/N/A/V/R;
X13 = R/S/A; X14 = W/F; X15 = T/P/A; X16 = D/E/L; X17 = D/G/Q; X18 = Q/D/A/G;
X19 = K/D; X20 = V/A/T/N/Q
(VP1 capsid protein of AA5 and modifications thereof)
SEQ ID NO: 124
MSFVDHPPDWLEEVGEGLREFLGLEAGPPKPKPNQQHQDQARGLVLPGYNYLGPGNGLDRGEPVN
RADEVAREHDISYNEQLEAGDNPYLKYNHADAEFQEKLADDTSFGGNLGKAVFQAKKRVLEPFGL
VEEGAKTAPTGKRIDDHFPKRKKARTEEDSKPSTSSDAEAGPSGSQQLQIPAQPASSLGADTMSA
GGGGPLGDNNQGADGVGNASGDWHCDSTWMGDRVVTKSTRTWVLPSYNNHQYREIKSX1X2X3X4
X5X6ANX7YFGYSTPWGYFDENRFHSHWSPRDWQRLINNYWGERPRSLRVKIFNIQVKEVTVQDS
TTTIANNLTSTVQVFTDDDYQLPYVVGNGTEGCLPAFPPQVFTLPQYGYATLNRDX8X9X10X11
PTERSSFFCLEYFPSKMLRTGNNFEFTYNFEEVPFHSSFAPSQNLEKLANPLVDQYLYRFX12ST
NNTGGVQFNKNLAGRYX13NTYKNWFPGPMGRTQGWNLGSGVNRASVSAX14X15TTNRMELEGA
SYQVPPQPNGMTNNX16X17GSNTYALENTMIFNSQPANPGTTATYLEGNMLITSESETQPVNRV
AYNVGGQMATNNQSSTTX18PATGTYNLQEIVPGSVWMERDVYLQGPIWAKIPETGAHFHPSPAM
GGFGLKHPPPMMLIKNTPVPGNITSFSDVPVSSFITQYSTGQVTVEMEWELKKENSKRWNPEIQY
TNNYNX19PX20FVDFAPDSTGEYRTTRPIGTRYLTRPL
X1 = Q/A/E/T/G; X2 = G/T/A/V/S; X3 = G/T/A/V; X4 = A/G/D; X5 = S/T; X6 = N;
X7 = H/T/A; X8 = N/D; X9 = G/T; X10 = S/E; X11 = Q/N; X12 = S/N/A/V/R;
X13 = R/S/A; X14 = W/F; X15 = T/P/A; X16 = D/E/L; X17 = D/G/Q; X18 = Q/D/A/G;
X19 = K/D; X20 = V/A/T/N/Q
(VP1 capsid proteins of AAV2 and modifications thereof)
SEQ ID NO: 125
MAADGYLPDWLEDTLSEGIRQWWKLKPGPPPPKPAERHKDDSRGLVLPGYKYLGPENGLDKGEPV
NEADAAALEHDKAYDRQLDSGDNPYLKYNHADAEFQERLKEDTSFGGNLGRAVFQAKKRVLEPLG
LVEEPVKTAPGKKRPVEHSPVEPDSSSGTGKAGQQPARKRLNFGQTGDADSVPDPQPLGQPPAAP
SGLGTNTMATGSGAPMADNNEGADGVGNSSGNWHCDSTWMGDRVITTSTRTWALPTYNNHLYKQI
SSQSGASNDNHYFGYSTPWGYFDFNRFHCHFSPRDWORLINNNWGFRPKRLNFKLENIQVKEVTQ
NDGTTTIANNLTSTVQVFTDSEYQLPYVLGSAHQGCLPPFPADVFMVPQYGYLTLNNGSQAVGRS
SFYCLEYFPSQMLRTGNNFTFSYTFEDVPFHSSYAHSQSLDRLMNPLIDQYLYYLX1RTNTPSGT
TTQSRLQFSQAGASDIX2DQSRNWLPGPCYRQQRVSKTSADNNNSEYSWTGATKYHLNGRDSLVN
PGPAMASHKDDEEKFFPQSGVLIFGKQGSEKTNVDIEKVMITDEEEIRTTNPVATEQYGSVSTNL
QRGNRQAATADVNTQGVLPGMVWQDRDVYLQGPIWAKIPHTDGHFHPSPLMGGFGLKHPPPQILI
KNTPVPANPSTTESAAKFASFITQYSTGQVSVEIEWELQKENSKRWNPEIQYTSNYNKSX3NVDF
TVDTNGVYSEPRPIGTRYLTRNL
X1 = R/S; X2 = A/R/S; X3 = T/V/A
(VP1 capsid proteins of AAV1 and modifications thereof)
SEQ ID NO: 126
AADGYLPDWLEDNLSEGIREWWDLKPGAPKPKANQQKQDDGRGLVLPGYKYLGPENGLDKGEPVN
AADAAALEHDKAYDQQLKAGDNPYLRYNHADAEFQERLQEDTSFGGNLGRAVEQAKKRVLEPLGL
VEEGAKTAPGKKRPVEQSPQEPDSSSGIGKTGQQPAKKRLNFGQTGDSESVPDPOPLGEPPATPA
AVGPTTMASGGGAPMADNNEGADGVGNASGNWHCDSTWLGDRVITTSTRTWALPTYNNHLYKQIS
SASTGASNDNHYFGYSTPWGYFDENRFHCHESPRDWQRLINNNWGFRPKRLNEKLFNIQVKEVTT
NDGVTTIANNLTSTVQVESDSEYQLPYVLGSAHQGCLPPFPADVEMIPQYGYLTLNNGSQAVGRS
SFYCLEYFPSQMLRTGNNFTFSYTFEEVPFHSSYAHSQSLDRLMNPLIDQYLYYLX1RTQNQSGS
AQNKDLLFSRGSPAGMX2VQPKNWLPGPCYRQQRVSKTKTDNNNSNFTWTGASKYNLNGRESIIN
PGTAMASHKDDEDKFFPMSGVMIFGKESAGASNTALDNVMITDEEEIKATNPVATERFGTVAVNF
QSSSTDPATGDVHAMGALPGMVWQDRDVYLQGPIWAKIPHTDGHFHPSPLMGGFGLKNPPPQILI
KNTPVPANPPAEFSATKFASFITQYSTGQVSVEIEWELQKENSKRWNPEVQYTSNYAKSX3NVDF
TVDNNGLYTEPRPIGTRYLTRPL
X1 = R/S; X2 = A/R/S; X3 = T/V/A
(VP1 capsid proteins of AAV6 and modifications thereof)
SEQ ID NO: 127
MAADGYLPDWLEDNLSEGIREWWDLKPGAPKPKANQQKQDDGRGLVLPGYKYLGPENGLDKGEPV
NAADAAALEHDKAYDQQLKAGDNPYLRYNHADAEFQERLQEDTSFGGNLGRAVFQAKKRVLEPFG
LVEEGAKTAPGKKRPVEQSPQEPDSSSGIGKTGQQPAKKRLNFGQTGDSESVPDPQPLGEPPATP
AAVGPTTMASGGGAPMADNNEGADGVGNASGNWHCDSTWLGDRVITTSTRTWALPTYNNHLYKQI
SSASTGASNDNHYFGYSTPWGYEDENRFHCHESPRDWQRLINNNWGFRPKRLNFKLFNIQVKEVT
TNDGVTTIANNLTSTVQVESDSEYQLPYVLGSAHQGCLPPFPADVEMIPQYGYLTLNNGSQAVGR
SSFYCLEYFPSQMLRTGNNFTFSYTFEDVPFHSSYAHSQSLDRLMNPLIDQYLYYLX1RTQNQSG
SAQNKDLLFSRGSPAGMX2VQPKNWLPGPCYRQQRVSKTKTDNNNSNFTWTGASKYNLNGRESII
NPGTAMASHKDDKDKFFPMSGVMIFGKESAGASNTALDNVMITDEEEIKATNPVATERFGTVAVN
LQSSSTDPATGDVHVMGALPGMVWQDRDVYLQGPIWAKIPHTDGHFHPSPLMGGFGLKHPPPQIL
IKNTPVPANPPAEFSATKFASFITQYSTGQVSVEIEWELQKENSKRWNPEVQYTSNYAKSX3NVD
FTVDNNGLYTEPRPIGTRYLTRPL
X1 = R/S; X2 = A/R/S; X3 = T/V/A
(VP1 capsid proteins of AAV3 and modifications thereof)
SEQ ID NO: 128
MAADGYLPDWLEDNLSEGIREWWALKPGVPQPKANQQHQDNRRGLVLPGYKYLGPGNGLDKGEPV
NEADAAALEHDKAYDQQLKAGDNPYLKYNHADAEFQERLQEDTSFGGNLGRAVEQAKKRILEPLG
LVEEAAKTAPGKKGAVDQSPQEPDSSSGVGKSGKQPARKRLNFGQTGDSESVPDPQPLGEPPAAP
TSLGSNTMASGGGAPMADNNEGADGVGNSSGNWHCDSQWLGDRVITTSTRTWALPTYNNHLYKQI
SSQSGASNDNHYFGYSTPWGYFDENRFHCHESPRDWQRLINNNWGFRPKKLSFKLENIQVRGVTQ
NDGTTTIANNLTSTVQVFTDSEYQLPYVLGSAHQGCLPPFPADVEMVPQYGYLTLNNGSQAVGRS
SFYCLEYFPSQMLRTGNNFQFSYTFEDVPFHSSYAHSQSLDRLMNPLIDQYLYYLX1RTQGTTSG
TTNQSRLLFSQAGPQSMX2LQARNWLPGPCYRQQRLSKTANDNNNSNFPWTAASKYHLNGRDSLV
NPGPAMASHKDDEEKFFPMHGNLIFGKEGTTASNAELDNVMITDEEEIRTTNPVATEQYGTVANN
LQSSNTAPTTGTVNHQGALPGMVWQDRDVYLQGPIWAKIPHTDGHFHPSPLMGGFGLKHPPPQIM
IKNTPVPANPPTTFSPAKFASFITQYSTGQVSVEIEWELQKENSKRWNPEIQYTSNYNKSX3NVD
FTVDTNGVYSEPRPIGTRYLTRNL
X1 = R/S; X2 = A/R/S; X3 = T/V/A
(VP1 capsid proteins of AAV LK03 and modifications thereof)
SEQ ID NO: 129
MAADGYLPDWLEDNLSEGIREWWALQPGAPKPKANQQHQDNARGLVLPGYKYLGPGNGLDKGEPV
NAADAAALEHDKAYDQQLKAGDNPYLKYNHADAEFQERLKEDTSFGGNLGRAVFQAKKRLLEPLG
LVEEAAKTAPGKKRPVDQSPQEPDSSSGVGKSGKQPARKRLNFGQTGDSESVPDPQPLGEPPAAP
TSLGSNTMASGGGAPMADNNEGADGVGNSSGNWHCDSQWLGDRVITTSTRTWALPTYNNHLYKQI
SSQSGASNDNHYFGYSTPWGYFDENRFHCHESPRDWQRLINNNWGFRPKKLSFKLENIQVKEVTQ
NDGTTTIANNLTSTVQVFTDSEYQLPYVLGSAHQGCLPPFPADVEMVPQYGYLTLNNGSQAVGRS
SFYCLEYFPSQMLRTGNNFQFSYTFEDVPFHSSYAHSQSLDRLMNPLIDQYLYYLX1RTQGTTSG
TTNQSRLLFSQAGPQSMX2LQARNWLPGPCYRQQRLSKTANDNNNSNFPWTAASKYHLNGRDSLV
NPGPAMASHKDDEEKFFPMHGNLIFGKEGTTASNAELDNVMITDEEEIRTTNPVATEQYGTVANN
LQSSNTAPTTRTVNDQGALPGMVWQDRDVYLQGPIWAKIPHTDGHFHPSPLMGGFGLKHPPPQIM
IKNTPVPANPPTTFSPAKFASFITQYSTGQVSVEIEWELQKENSKRWNPEIQYTSNYNKSX3NVD
FTVDTNGVYSEPRPIGTRYLTRPL
X1 = R/S; X2 = A/R/S; X3 = T/V/A
(VP1 capsid protein of AAV7 and modifications thereof)
SEQ ID NO: 130
MAADGYLPDWLEDNLSEGIREWWDLKPGAPKPKANQQKQDNGRGLVLPGYKYLGPENGLDKGEPV
NAADAAALEHDKAYDQQLKAGDNPYLRYNHADAEFQERLQEDTSEGGNLGRAVEQAKKRVLEPLG
LVEEGAKTAPAKKRPVEPSPQRSPDSSTGIGKKGQQPARKRLNFGQTGDSESVPDPQPLGEPPAA
PSSVGSGTVAAGGGAPMADNNEGADGVGNASGNWHCDSTWLGDRVITTSTRTWALPTYNNHLYKQ
ISSETAGSTNDNTYFGYSTPWGYFDFNRFHCHESPRDWQRLINNNWGERPKKLRFKLENIQVKEV
TTNDGVTTIANNLTSTIQVFSDSEYQLPYVLGSAHQGCLPPFPADVEMIPQYGYLTLNNGSQSVG
RSSFYCLEYFPSQMLRTGNNFEFSYSFEDVPFHSSYAHSQSLDRLMNPLIDQYLYYLX1RTQSNP
GGTAGNRELQFYQGGPSTMX2EQAKNWLPGPCFRQQRVSKTLDQNNNSNFAWTGATKYHLNGRNS
LVNPGVAMATHKDDEDRFFPSSGVLIFGKTGATNKTTLENVLMTNEEEIRPTNPVATEEYGIVSS
NLQAANTAAQTQVVNNQGALPGMVWQNRDVYLQGPIWAKIPHTDGNFHPSPLMGGFGLKHPPPQI
LIKNTPVPANPPEVFTPAKFASFITQYSTGQVSVEIEWELQKENSKRWNPEIQYTSNFEKQ
X3GVDFAVDSQGVYSEPRPIGTRYLTRNL
X1 = R/S; X2 = A/R/S; X3 = T/V/A
(VP1 capsid protein of AAV8 and modifications thereof)
SEQ ID NO: 131
AADGYLPDWLEDNLSEGIREWWALKPGAPKPKANQQKQDDGRGLVLPGYKYLGPENGLDKGEPVN
AADAAALEHDKAYDQQLQAGDNPYLRYNHADAEFQERLQEDTSFGGNLGRAVEQAKKRVLEPLGL
VEEGAKTAPGKKRPVEPSPQRSPDSSTGIGKKGQQPARKRLNFGQTGDSESVPDPQPLGEPPAAP
SGVGPNTMAAGGGAPMADNNEGADGVGSSSGNWHCDSTWLGDRVITTSTRTWALPTYNNHLYKQI
SNGTSGGATNDNTYFGYSTPWGYFDENRFHCHFSPRDWORLINNNWGFRPKRLSFKLFNIQVKEV
TQNEGTKTIANNLTSTIQVFTDSEYQLPYVLGSAHQGCLPPFPADVEMIPQYGYLTLNNGSQAVG
RSSFYCLEYFPSQMLRTGNNFQFTYTFEDVPFHSSYAHSQSLDRLMNPLIDQYLYYLX1RTQTTG
GTANTQTLGFSQGGPNTMX2NQAKNWLPGPCYRQQRVSTTTGQNNNSNFAWTAGTKYHLNGRNSL
ANPGIAMATHKDDEERFFPSNGILIFGKQNAARDNADYSDVMLTSEEEIKTTNPVATEEYGIVAD
NLQQQNTAPQIGTVNSQGALPGMVWQNRDVYLQGPIWAKIPHTDGNFHPSPLMGGFGLKHPPPQI
LIKNTPVPADPPTTENQSKLNSFITQYSTGQVSVEIEWELQKENSKRWNPEIQYTSNYYKSX3SV
DFAVNTEGVYSEPRPIGTRYLTRNL
X1 = R/S; X2 = A/R/S; X3 = T/V/A
(VP1 capsid protein of AAV hu. 37 and modifications thereof)
SEQ ID NO: 132
MAADGYLPDWLEDNLSEGIREWWDLKPGAPKPKANQQKQDDGRGLVLPGYKYLGPENGLDKGEPV
NAADAAALEHDKAYDQQLKAGDNPYLRYNHADAEFQERLQEDTSEGGNLGRAVEQAKKRVLEPLG
LVEEAAKTAPGKKRPVEPSPQRSPDSSTGIGKKGQQPAKKRLNFGQTGDSESVPDPQPIGEPPAG
PSGLGSGTMAAGGGAPMADNNEGADGVGSSSGNWHCDSTWLGDRVITTSTRTWALPTYNNHLYKQ
ISNGTSGGSTNDNTYFGYSTPWGYFDFNRFHCHFSPRDWQRLINNNWGFRPKRLSFKLFNIQVKE
VTQNEGTKTIANNLTSTIQVFTDSEYQLPYVLGSAHQGCLPPFPADVEMIPQYGYLTLNNGSQAV
GRSSFYCLEYFPSQMLRTGNNFEFSYTFEDVPFHSSYAHSQSLDRLMNPLIDQYLYYLX1RTQST
GGTQGTQQLLFSQAGPANMX2AQAKNWLPGPCYRQQRVSTTLSQNNNSNFAWTGATKYHLNGRDS
LVNPGVAMATHKDDEERFFPSSGVLMFGKQGAGRDNVDYSSVMLTSEEEIKTTNPVATEQYGVVA
DNLQQTNTGPIVGNVNSQGALPGMVWQNRDVYLQGPIWAKIPHTDGNFHPSPLMGGFGLKHPPPQ
ILIKNTPVPADPPTTESQAKLASFITQYSTGQVSVEIEWELQKENSKRWNPEIQYTSNYYKSX3N
VDFAVNTEGTYSEPRPIGTRYLTRNL
X1 = R/S; X2 = A/R/S; X3 = T/V/A
(VP1 capsid protein of AAV rh.10 and modifications thereof)
SEQ ID NO: 133
MAADGYLPDWLEDNLSEGIREWWDLKPGAPKPKANQQKQDDGRGLVLPGYKYLGPENGLDKGEPV
NAADAAALEHDKAYDQQLKAGDNPYLRYNHADAEFQERLQEDTSFGGNLGRAVFQAKKRVLEPLG
LVEEGAKTAPGKKRPVEPSPQRSPDSSTGIGKKGQQPAKKRLNFGQTGDSESVPDPQPIGEPPAG
PSGLGSGTMAAGGGAPMADNNEGADGVGSSSGNWHCDSTWLGDRVITTSTRTWALPTYNNHLYKQ
ISNGTSGGSTNDNTYFGYSTPWGYFDENRFHCHESPRDWQRLINNNWGFRPKRLNFKLENIQVKE
VTQNEGTKTIANNLTSTIQVFTDSEYQLPYVLGSAHQGCLPPFPADVEMIPQYGYLTLNNGSQAV
GRSSFYCLEYFPSQMLRTGNNFEFSYQFEDVPFHSSYAHSQSLDRLMNPLIDQYLYYLX1RTQST
GGTAGTQQLLFSQAGPNNMX2AQAKNWLPGPCYRQQRVSTTLSQNNNSNFAWTGATKYHLNGRDS
LVNPGVAMATHKDDEERFFPSSGVLMFGKQGAGKDNVDYSSVMLTSEEEIKTTNPVATEQYGVVA
DNLQQQNAAPIVGAVNSQGALPGMVWQNRDVYLQGPIWAKIPHTDGNFHPSPLMGGFGLKHPPPQ
ILIKNTPVPADPPTTESQAKLASFITQYSTGQVSVEIEWELQKENSKRWNPEIQYTSNYYKSX3N
VDFAVNTDGTYSEPRPIGTRYLTRNL
X1 = R/S; X2 = A/R/S; X3 = T/V/A
(VP1 capsid protein of AA9 and modifications thereof)
SEQ ID NO: 134
MAADGYLPDWLEDNLSEGIREWWALKPGAPQPKANQQHQDNARGLVLPGYKYLGPGNGLDKGEPV
NAADAAALEHDKAYDQQLKAGDNPYLKYNHADAEFQERLKEDTSFGGNLGRAVFQAKKRLLEPLG
LVEEAAKTAPGKKRPVEQSPQEPDSSAGIGKSGAQPAKKRLNFGQTGDTESVPDPQPIGEPPAAP
SGVGSLTMASGGGAPVADNNEGADGVGSSSGNWHCDSQWLGDRVITTSTRTWALPTYNNHLYKQI
SNSTSGGSSNDNAYFGYSTPWGYFDFNRFHCHFSPRDWORLINNNWGFRPKRLNFKLENIQVKEV
TDNNGVKTIANNLTSTVQVFTDSDYQLPYVLGSAHEGCLPPFPADVEMIPQYGYLTLNDGSQAVG
RSSFYCLEYFPSQMLRTGNNFQFSYEFENVPFHSSYAHSQSLDRLMNPLIDQYLYYLX1KTINGS
GQNQQTLKFSVAGPSNMX2VQGRNYIPGPSYRQQRVSTTVTQNNNSEFAWPGASSWALNGRNSLM
NPGPAMASHKEGEDRFFPLSGSLIFGKQGTGRDNVDADKVMITNEEEIKTTNPVATESYGQVATN
HQSAQAQAQTGWVQNQGILPGMVWQDRDVYLQGPIWAKIPHTDGNFHPSPLMGGFGMKHPPPQIL
IKNTPVPADPPTAFNKDKLNSFITQYSTGQVSVEIEWELQKENSKRWNPEIQYTSNYYKSX3NVE
FAVNTEGVYSEPRPIGTRYLTRNL
X1 = R/S; X2 = A/R/S; X3 = T/V/A
(VP1 capsid protein of hu68 and modifications thereof)
SEQ ID NO: 135
MAADGYLPDWLEDNLSEGIREWWALKPGAPQPKANQQHQDNARGLVLPGYKYLGPGNGLDKGEPV
NEADAAALEHDKAYDQQLKAGDNPYLKYNHADAEFQERLKEDTSFGGNLGRAVEQAKKRLLEPLG
LVEEAAKTAPGKKRPVEQSPQEPDSSVGIGKSGAQPAKKRLNFGQTGDTESVPDPQPIGEPPAAP
SGVGSLTMASGGGAPVADNNEGADGVGSSSGNWHCDSQWLGDRVITTSTRTWALPTYNNHLYKQI
SNSTSGGSSNDNAYFGYSTPWGYFDENRFHCHESPRDWORLINNNWGFRPKRLNEKLENIQVKEV
TDNNGVKTIANNLTSTVQVFTDSDYQLPYVLGSAHEGCLPPFPADVEMIPQYGYLTLNDGSQAVG
RSSFYCLEYFPSQMLRTGNNFQFSYEFENVPFHSSYAHSQSLDRLMNPLIDQYLYYLX1KTINGS
GQNQQTLKFSVAGPSNMX2VQGRNYIPGPSYRQQRVSTTVTQNNNSEFAWPGASSWALNGRNSLM
NPGPAMASHKEGEDRFFPLSGSLIFGKQGTGRDNVDADKVMITNEEEIKTTNPVATESYGQVATN
HQSAQAQAQTGWVQNQGILPGMVWQDRDVYLQGPIWAKIPHTDGNFHPSPLMGGFGMKHPPPQIL
IKNTPVPADPPTAFNKDKLNSFITQYSTGQVSVEIEWELQKENSKRWNPEIQYTSNYYKSX3NVE
FAVNTEGVYSEPRPIGTRYLTRNL
X1 = R/S; X2 = A/R/S; X3 = T/V/A
(VP1 capsid protein of AAV10 and modifications thereof)
SEQ ID NO: 136
MAADGYLPDWLEDNLSEGIREWWDLKPGAPKPKANQQKQDDGRGLVLPGYKYLGPENGLDKGEPV
NAADAAALEHDKAYDQQLKAGDNPYLRYNHADAEFQERLQEDTSEGGNLGRAVEQAKKRVLEPLG
LVEEAAKTAPGKKRPVEPSPQRSPDSSTGIGKKGQQPAKKRLNFGQTGESESVPDPQPIGEPPAG
PSGLGSGTMAAGGGAPMADNNEGADGVGSSSGNWHCDSTWLGDRVITTSTRTWALPTYNNHLYKQ
ISNGTSGGSTNDNTYFGYSTPWGYFDENRFHCHESPRDWQRLINNNWGFRPKRLSFKLENIQVKE
VTQNEGTKTIANNLTSTIQVFTDSEYQLPYVLGSAHQGCLPPFPADVEMIPQYGYLTLNNGSQAV
GRSSFYCLEYFPSQMLRTGNNFEFSYTFEDVPFHSSYAHSQSLDRLMNPLIDQYLYYLX1RTQST
GGTQGTQQLLFSQAGPANMX2AQAKNWLPGPCYRQQRVSTTLSQNNNSNFAWTGATKYHLNGRDS
LVNPGVAMATHKDDEERFFPSSGVLMFGKOGAGRDNVDYSSVMLTSEEEIKTTNPVATEQYGVVA
DNLQQANTGPIVGNVNSQGALPGMVWQNRDVYLQGPIWAKIPHTDGNFHPSPLMGGFGLKHPPPQ
ILIKNTPVPADPPTTESQAKLASFITQYSTGQVSVEIEWELQKENSKRWNPEIQYTSNYYKSX3N
VDFAVNTEGTYSEPRPIGTRYLTRNL
X1 = R/S; X2 = A/R/S; X3 = T/V/A
(VP1 capsid protein of AA5 and modifications thereof)
SEQ ID NO: 137
MSFVDHPPDWLEEVGEGLREFLGLEAGPPKPKPNQQHQDQARGLVLPGYNYLGPGNGLDRGEPVN
RADEVAREHDISYNEQLEAGDNPYLKYNHADAEFQEKLADDTSFGGNLGKAVFQAKKRVLEPFGL
VEEGAKTAPTGKRIDDHFPKRKKARTEEDSKPSTSSDAEAGPSGSQQLQIPAQPASSLGADTMSA
GGGGPLGDNNQGADGVGNASGDWHCDSTWMGDRVVTKSTRTWVLPSYNNHQYREIKSGSVDGSNA
NAYFGYSTPWGYFDFNRFHSHWSPRDWQRLINNYWGERPRSLRVKIFNIQVKEVTVQDSTTTIAN
NLTSTVQVFTDDDYQLPYVVGNGTEGCLPAFPPQVFTLPQYGYATLNRDNTENPTERSSFFCLEY
FPSKMLRTGNNFEFTYNFEEVPFHSSFAPSQNLFKLANPLVDQYLYRFX1STNNTGGVQENKNLA
GRYX2NTYKNWFPGPMGRTQGWNLGSGVNRASVSAFATTNRMELEGASYQVPPQPNGMTNNLQGS
NTYALENTMIENSQPANPGTTATYLEGNMLITSESETQPVNRVAYNVGGQMATNNQSSTTAPATG
TYNLQEIVPGSVWMERDVYLQGPIWAKIPETGAHFHPSPAMGGFGLKHPPPMMLIKNTPVPGNIT
SFSDVPVSSFITQYSTGQVTVEMEWELKKENSKRWNPEIQYTNNYNDPX3FVDFAPDSTGEYRTT
RPIGTRYLTRPL
X1 = R/S; X2 = A/R/S; X3 = T/V/A
(Anc80 scaffold)
SEQ ID NO: 138
MAADGYLPDWLEDNLSEGIREWWDLKPGAPKPKANQQKQDDGRGLVLPGYKYLGPENGLD
KGEPVNAADAAALEHDKAYDQQLKAGDNPYLRYNHADAEFQERLQEDTSEGGNLGRAVEQ
AKKRVLEPLGLVEEGAKTAPGKKRPVEQSPQEPDSSSGIGKKGQQPAXKRLNFGQTGDSE
SVPDPQPLGEPPAAPSGVGSNTMAXGGGAPMADNNEGADGVGNASGNWHCDSTWLGDRVI
TTSTRTWALPTYNNHLYKQISSQSGXSTNDNTYFGYSTPWGYFDENRFHCHESPRDWORL
INNNWGFRPKXLNFKLFNIQVKEVTTNDGTTTIANNLTSTVQVFTDSEYQLPYVLGSAHQ
GCLPPFPADVEMIPQYGYLTLNNGSQAVGRSSFYCLEYFPSQMLRTGNNFXFSYTFEDVP
FHSSYAHSQSLDRLMNPLIDQYLYYLSRTQTTSGTAGNRXLQFSQAGPSSMANQAKNWLP
GPCYRQQRVSKTXNQNNNSNFAWTGATKYHLNGRDSLVNPGPAMATHKDDEDKFFPMSGV
LIFGKQGAGNSNVDLDNVMITXEEEIKTTNPVATEXYGTVATNLQSXNTAPATGTVNSQG
ALPGMVWQXRDVYLQGPIWAKIPHTDGHFHPSPLMGGFGLKHPPPQILIKNTPVPANPPT
TFSPAKFASFITQYSTGQVSVEIEWELQKENSKRWNPEIQYTSNYNKSTNVDFAVDINGV
YSEPRPIGTRYLTRNL
<222> (168) . . . (168)
<223> Lys or Arg
<222> (205) . . . (205)
<223> Ala or Ser
<222> (266) . . . (266)
<223> Ala or Gly
<222> (311) . . . (311)
<223> Arg or Lys
<222> (411) . . . (411)
<223> Glu or Gln
<222> (460) . . . (460)
<223> Thr or Glu
<222> (493) . . . (493)
<223> Ala or Thr
<222> (562) . . . (562)
<223> Ser or Asn
<222> (576) . . . (576)
<223> Gln or Glu
<222> (587) . . . (587)
<223> Ser or Ala
<222> (609) . . . (609)
<223> Asn or Asp
(Anc81 scaffold)
SEQ ID NO: 139
MAADGYLPDWLEDNLSEGIREWWDLKPGAPKPKANQQKQDDGRGLVLPGYKYLGPENGLD
KGEPVNAADAAALEHDKAYDQQLKAGDNPYLRYNHADAEFQERLQEDTSFGGNLGRAVEQ
AKKRVLEPLGLVEEGAKTAPGKKRPVEQSPQEPDSSXGIGKKGQQPAXKRLNFGQTGDSE
SVPDPQPLGEPPAAPSGVGSNTMAAGGGAPMADNNEGADGVGNASGNWHCDSTWLGDRVI
TTSTRTWALPTYNNHLYKQISXXQSGGSTNDNTYFGYSTPWGYFDENRFHCHESPRDWQR
LINNNWGFRPKXLNFKLFNIQVKEVTTNDGTTTIANNLTSTVQVFTDSEYQLPYVLGSAH
QGCLPPFPADVFMIPQYGYLTLNNGSQAVGRSSFYCLEYFPSQMLRTGNNEXFSYTFEDV
PFHSSYAHSQSLDRLMNPLIDQYLYYLSRTQTTGGTAGNXXLQFSQAGPSSMANQAKNWL
PGPCYRQQRVSKTTNQNNNSNFAWTGATKYHLNGRDSLVNPGVAMATHKDDEDREFPSSG
VLIFGKQGAGNXNVDXXNVMITXEEEIKTTNPVATEEYGXVATNLQSXNTAPQTGTVNSQ
GALPGMVWQNRDVYLQGPIWAKIPHTDGNFHPSPLMGGFGLKHPPPQILIKNTPVPANPP
TTFXPAKFASFITQYSTGQVSVEIEWELQKENSKRWNPEIQYTSNYNKSTNVDFAVDTEG
VYSEPRPIGTRYLTRNL
<222> (157) . . . (157)
<223> Thr or Ser
<222> (168) . . . (168)
<223> Lys or Arg
<222> (262) . . . (262)
<223> Asn or Ser
<222> (263) . . . (263)
<223> Ser or His
<222> (312) . . . (312)
<223> Arg or Lys
<222> (412) . . . (412)
<223> Glu or Gln
<222> (460) . . . (460)
<223> Arg or Gln
<222> (461) . . . (461)
<223> Thr or Glu
<222> (552) . . . (552)
<223> Asp or Ser
<222> (556) . . . (556)
<223> Leu or Tyr
<222> (557) . . . (557)
<223> Asp or Ser
<222> (563) . . . (563)
<223> Ser or Asn
<222> (580) . . . (580)
<223> Val or Ile
<222> (588) . . . (588)
<223> Asn or Ser
<222> (664) . . . (664)
<223> Ser or Thr
(Anc82 scaffold)
SEQ ID NO: 140
MAADGYLPDWLEDNLSEGIREWWDLKPGAPKPKANQQKQDDGRGLVLPGYKYLGPENGLD
KGEPVNAADAAALEHDKAYDQQLKAGDNPYLRYNHADAEFQERLQEDTSFGGNLGRAVEQ
AKKRVLEPLGLVEEGAKTAPGKKRPVEQSPQREPDSSXGIGKKGQQPAXKRLNFGQTGDS
ESVPDPQPLGEPPAAPSGVGSNTMAAGGGAPMADNNEGADGVGNSSGNWHCDSTWLGDRV
ITTSTRTWALPTYNNHLYKQISNGTSGGSTNDNTYFGYSTPWGYFDENRFHCHESPRDWQ
RLINNNWGFRPKRLNFKLFNIQVKEVTTNEGTKTIANNLTSTVQVFTDSEYQLPYVLGSA
HQGCLPPFPADVEMIPQYGYLTLNNGSQAVGRSSFYCLEYFPSQMLRTGNNFQFSYTFED
VPFHSSYAHSQSLDRLMNPLIDQYLYYLSRTQTTGGTAGTQTLQFSQAGPSSMANQAKNW
LPGPCYRQQRVSTTTNQNNNSNFAWTGATKYHLNGRDSLVNPGVAMATHKDDEDREFPSS
GVLIFGKQGAGNDNVDYSNVMITXEEEIKTTNPVATEEYGVVATNLQSANTAPQTGTVNS
QGALPGMVWQNRDVYLQGPIWAKIPHTDGNFHPSPLMGGFGLKHPPPQILIKNTPVPADP
PTTFNQAKLNSFITQYSTGQVSVEIEWELQKENSKRWNPEIQYTSNYYKSTNVDFAVNTE
GVYSEPRPIGTRYLTRNL
<222> (158) . . . (158)
<223> Thr or Ser
<222> (169) . . . (169)
<223> Lys or Arg
<222> (564) . . . (564)
<223> Ser or Asn
(Anc83 scaffold)
SEQ ID NO: 141
MAADGYLPDWLEDNLSEGIREWWDLKPGAPKPKANQQKQDDGRGLVLPGYKYLGPENGLD
KGEPVNAADAAALEHDKAYDQQLKAGDNPYLRYNHADAEFQERLQEDTSEGGNLGRAVEQ
AKKRVLEPLGLVEEGAKTAPGKKRPVEQSPQREPDSSXGIGKKGQQPAXKRLNFGOTGDS
ESVPDPQPLGEPPAAPSGVGSNTMAAGGGAPMADNNEGADGVGSSSGNWHCDSTWLGDRV
ITTSTRTWALPTYNNHLYKQISNGTSGGSTNDNTYFGYSTPWGYFDENRFHCHESPRDWQ
RLINNNWGFRPKRLXFKLENIQVKEVTQNEGTKTIANNLTSTIQVFTDSEYQLPYVLGSA
HQGCLPPFPADVEMIPQYGYLTLNNGSQAVGRSSFYCLEYFPSQMLRTGNNEXESYTFED
VPFHSSYAHSQSLDRLMNPLIDQYLYYLSRTQTTGGTAGTQTLQFSQAGPSXMANQAKNW
LPGPCYRQQRVSTTTSQNNNSNFAWTGATKYHLNGRDSLVNPGVAMATHKDDEXRFFPSS
GXLIFGKQGAGKDNVDYSNVMLTSEEEIKTTNPVATEEYGVVADNLQQQNTAPQXGTVNS
QGALPGMVWQNRDVYLQGPIWAKIPHTDGNFHPSPLMGGFGLKHPPPQILIKNTPVPADP
PTTFNQAKLNSFITQYSTGQVSVEIEWELQKENSKRWNPEIQYTSNYYKSTNVDFAVNTE
GVYSEPRPIGTRYLTRNL
<222> (158) . . . (158)
<223> Thr or Ser
<222> (169) . . . (169)
<223> Arg or Lys
<222> (315) . . . (315)
<223> Asn or Ser
<222> (413) . . . (413)
<223> Gln or Glu
<222> (472) . . . (472)
<223> Asn, Thr or Ser
<222> (534) . . . (534)
<223> Asp or Glu
<222> (542) . . . (542)
<223> Ile or Val
<222> (595) . . . (595)
<223> Ile or Val
(Anc84 scaffold)
SEQ ID NO: 142
MAADGYLPDWLEDNLSEGIREWWDLKPGAPKPKANQQKQDDGRGLVLPGYKYLGPENGLD
KGEPVNAADAAALEHDKAYDQQLKAGDNPYLRYNHADAEFQERLQEDTSFGGNLGRAVFQ
AKKRVLEPLGLVEEGAKTAPGKKRPVEPSPQRSPDSSTGIGKKGQQPAXKRLNFGQTGDS
ESVPDPQPIGEPPAAPSGVGSGTMAAGGGAPMADNNEGADGVGSSSGNWHCDSTWLGDRV
ITTSTRTWALPTYNNHLYKQISNGTSGGSTNDNTYFGYSTPWGYFDENRFHCHESPRDWQ
RLINNNWGFRPKRLXFKLENIQVKEVTQNEGTKTIANNLTSTIQVFTDSEYQLPYVLGSA
HQGCLPPFPADVFMIPQYGYLTLNNGSQAVGRSSFYCLEYFPSQMLRTGNNFEFSYTFED
VPFHSSYAHSQSLDRLMNPLIDQYLYYLSRTQSTGGTAGTQQLLFSQAGPSNMSAQAKNW
LPGPCYRQQRVSTTLSQNNNSNFAWTGATKYHLNGRDSLVNPGVAMATHKDDEXRFFPSS
GXLMFGKQGAGKDNVDYSNVMLTSEEEIKTTNPVATEQYGVVADNLQQONTAPIVGAVNS
QGALPGMVWQNRDVYLQGPIWAKIPHTDGNFHPSPLMGGFGLKHPPPQILIKNTPVPADP
PTTFNQAKLNSFITQYSTGQVSVEIEWELQKENSKRWNPEIQYTSNYYKSTNVDFAVNTE
GVYSEPRPIGTRYLTRNL
<222> (169) . . . (169)
<223> Arg or Lys
<222> (315) . . . (315)
<223> Asn or Ser
<222> (534) . . . (534)
<223> Asp or Glu
<222> (542) . . . (542)
<223> Ile or Val
(Anc94 scaffold)
SEQ ID NO: 143
MAADGYLPDWLEDNLSEGIREWWDLKPGAPKPKANQQKODDGRGLVLPGYKYLGPENGLD
KGEPVNAADAAALEHDKAYDQQLKAGDNPYLRYNHADAEFQERLQEDTSFGGNLGRAVFQ
AKKRVLEPLGLVEEGAKTAPGKKRPVEPSPQRSPDSSTGIGKKGQQPAKKRLNFGQTGDS
ESVPDPQPIGEPPAGPSGLGSGTMAAGGGAPMADNNEGADGVGSSSGNWHCDSTWLGDRV
ITTSTRTWALPTYNNHLYKQISNGTSGGSTNDNTYFGYSTPWGYFDENRFHCHESPRDWQ
RLINNNWGFRPKRLNFKLENIQVKEVTQNEGTKTIANNLTSTIQVFTDSEYQLPYVLGSA
HQGCLPPFPADVFMIPQYGYLTLNNGSQAVGRSSFYCLEYFPSQMLRTGNNFEFSYTFED
VPFHSSYAHSQSLDRLMNPLIDQYLYYLSRTQSTGGTAGTQQLLESQAGPXNMSAQAKNW
LPGPCYRQQRVSTTLSQNNNSNFAWTGATKYHLNGRDSLVNPGVAMATHKDDEERFFPSS
GVLMFGKQGAGKDNVDYSSVMLTSEEEIKTTNPVATEQYGVVADNLQQQNTAPIVGAVNS
QGALPGMVWQNRDVYLQGPIWAKIPHTDGNFHPSPLMGGFGLKHPPPQILIKNTPVPADP
PTTFSQAKLASFITQYSTGQVSVEIEWELQKENSKRWNPEIQYTSNYYKSTNVDFAVNTE
GTYSEPRPIGTRYLTRNL
<222> (471) . . . (471)
<223> Ser or Asn
(Anc113 scaffold)
SEQ ID NO: 144
MAADGYLPDWLEDNLSEGIREWWDLKPGAPKPKANQQKQDDGRGLVLPGYKYLGPENGLD
KGEPVNAADAAALEHDKAYDQQLKAGDNPYLRYNHADAEFQERLQEDTSFGGNLGRAVEQ
AKKRVLEPLGLVEEGAKTAPGKKRPVEXSPQRSPDSSTGIGKKGQQPAXKRLNFGQTGDS
ESVPDPQPLGEPPAAPSGVGSGTMAAGGGAPMADNNEGADGVGNASGNWHCDSTWLGDRV
ITTSTRTWALPTYNNHLYKQISSQSAGSTNDNTYFGYSTPWGYFDENRFHCHESPRDWQR
LINNNWGFRPKKLXFKLENIQVKEVTTNDGVTTIANNLTSTVQVESDSEYQLPYVLGSAH
QGCLPPFPADVEMIPQYGYLTLNNGSQSVGRSSFYCLEYFPSQMLRTGNNFEFSYTFEDV
PFHSSYAHSQSLDRLMNPLIDQYLYYLARTQSTTGGTAGNRELQFXQAGPSTMAEQAKNW
LPGPCYRQQRVSKTLDQNNNSNFAWTGATKYHLNGRNSLVNPGVAMATHKDDEDRFFPSS
GVLIFGKTGAANKTTLENVLMTXEEEIKTTNPVATEEYGXVSSNLQSXNTAPQTQTVNSQ
GALPGMVWQNRDVYLQGPIWAKIPHTDGNFHPSPLMGGFGLKHPPPQILIKNTPVPANPP
EVFTPAKFASFITQYSTGQVSVEIEWELQKENSKRWNPEIQYTSNYDKSTNVDFAVDSEG
VYSEPRPIGTRYLTRNL
<222> (148) . . . (148)
<223> Pro or Gln
<222> (169) . . . (169)
<223> Lys or Arg
<222> (314) . . . (314)
<223> Arg or Asn
<222> (466) . . . (466)
<223> Tyr or His
<222> (563) . . . (563)
<223> Asn or Ser
<222> (580) . . . (580)
<223> Val or Ile
<222> (588) . . . (588)
<223> Ala or Ser
(Anc126 scaffold)
SEQ ID NO: 145
MAADGYLPDWLEDNLSEGIREWWDLKPGAPKPKANQQKQDDGRGLVLPGYKYLGPENGLD
KGEPVNAADAAALEHDKAYDQQLKAGDNPYLRYNHADAEFQERLQEDTSFGGNLGRAVFQ
AKKRVLEPLGLVEEGAKTAPGKKRPVEQSPQEPDSSSGIGKXGQQPAXKRLNFGQTGDSE
SVPDPQPLGEPPAAPSGVGSNTMASGGGAPMADNNEGADGVGNXSGNWHCDSTWLGDRVI
TTSTRTWALPTYNNHLYKQISSQSGASNDNHYFGYSTPWGYFDENRFHCHESPRDWQRLI
NNNWGFRPKXLNFKLENIQVKEVTTNDGTTTIANNLTSTVQVFTDSEYQLPYVLGSAHQG
CLPPFPADVEMIPQYGYLTLNNGSQAVGRSSFYCLEYFPSQMLRTGNNFXFSYTFEDVPF
HSSYAHSQSLDRLMNPLIDQYLYYLXRTQTTSGTAQNRELXFSQAGPSSMXNQAKNWLPG
PCYRQQRVSKTANDNNNSNFAWTGATKYHLNGRDSLVNPGPAMASHKDDEDKFFPMSGVL
IFGKQGAGASNVDLDNVMITDEEEIKTTNPVATEQYGTVATNLQSSNTAPATGTVNSQGA
LPGMVWQDRDVYLQGPIWAKIPHTDGHFHPSPLMGGFGLKHPPPQILIKNTPVPANPPTT
FSPAKFASFITQYSTGQVSVEIEWELQKENSKRWNPEIQYTSNYNKSXNVDFTVDINGVY
SEPRPIGTRYLTRNL
<222> (162) . . . (162)
<223> Ser or Thr
<222> (168) . . . (168)
<223> Lys or Arg
<222> (224) . . . (224)
<223> Ala or Ser
<222> (310) . . . (310)
<223> Arg or Lys
<222> (410) . . . (410)
<223> Thr or Gln
<222> (446) . . . (446)
<223> Ser or Asn
<222> (461) . . . (461)
<223> Gln or Leu
<222> (471) . . . (471)
<223> Ala or Ser
<222> (708) . . . (708)
<223> Ala or Thr
(Anc127 scaffold)
SEQ ID NO: 146
MAADGYLPDWLEDNLSEGIREWWDLKPGAPQPKANQQHQDDXRGLVLPGYKYLGPENGLD
KGEPVNEADAAALEHDKAYDQQLKAGDNPYLKYNHADAEFQERLQEDTSFGGNLGRAVEQ
AKKRVLEPLGLVEEAAKTAPGKKRPVEQSPQEPDSSSGIGKSGQQPAXKRLNFGQTGDSE
SVPDPQPLGEPPAAPSGVGSNTMASGGGAPMADNNEGADGVGNSSGNWHCDSTWLGDRVI
TTSTRTWALPTYNNHLYKQISSQSGASNDNHYFGYSTPWGYFDENRFHCHESPRDWQRLI
NNNWGFRPKXLNFKLFNIQVKEVTQNDGTTTIANNLTSTVQVFTDSEYQLPYVLGSAHQG
CLPPFPADVEMIPQYGYLTLNNGSQAVGRSSFYCLEYFPSQMLRTGNNEXFSYTFEDVPF
HSSYAHSQSLDRLMNPLIDQYLYYLXRTQTTSGTTQQSRLXFSQAGPSSMXQQAXNWLPG
PCYRQQRVSKTANDNNNSNFAWTXATKYHLNGRDSLVNPGPAMASHKDDEEKFFPMHGXL
IFGKQGTGASNVDLDNVMITDEEEIRTTNPVATEQYGTVATNLQSSNTAPATGTVNSQGA
LPGMVWQDRDVYLQGPIWAKIPHTDGHFHPSPLMGGFGLKHPPPQILIKNTPVPANPPTT
FSPAKFASFITQYSTGQVSVEIEWELQKENSKRWNPEIQYTSNYNKSVNVDFTVDINGVY
SEPRPIGTRYLTRNL
<222> (42) . . . (42)
<223> Gly or Ser
<222> (168) . . . (168)
<223> Arg or Lys
<222> (310) . . . (310)
<223> Lys or Arg
<222> (410) . . . (410)
<223> Thr or Gln
<222> (446) . . . (446)
<223> Ser or Arg
<222> (461) . . . (461)
<223> Gln or Leu
<222> (471) . . . (471)
<223> Ala or Ser
<222> (475) . . . (475)
<223> Lys or Arg
<222> (504) . . . (504)
<223> Gly or Ala
<222> (539) . . . (539)
<223> Val or Asn
(nucleic acid encoding Anc80 scaffold)
SEQ ID NO: 147
atggctgccgatggttatcttccagattggctcgaggacaacctctctgagggcattcgc
gagtggtgggacttgaaacctggagccccgaaacccaaagccaaccagcaaaagcaggac
gacggccggggtctggtgcttcctggctacaagtacctcggacccttcaacggactcgac
aagggggagcccgtcaacgcggcggacgcagcggccctcgagcacgacaaggcctacgac
cagcagctcaaagcgggtgacaatccgtacctgcggtataaccacgccgacgccgagttt
caggagcgtctgcaagaagatacgtcttttgggggcaacctcgggcgagcagtcttccag
gccaagaagcgggttctcgaacctctcggtctggttgaggaaggcgctaagacggctcct
ggaaagaagagaccggtagagcaatcaccccaggaaccagactcctcttcgggcatcggc
aagaaaggccagcagcccgcgnnnaagagactcaactttgggcagacaggcgactcagag
tcagtgcccgaccctcaaccactcggagaaccccccgcagccccctctggtgtgggatct
aatacaatggcannnggcggtggcgctccaatggcagacaataacgaaggcgccgacgga
gtgggtaacgcctcaggaaattggcattgcgattccacatggctgggcgacagagtcatc
accaccagcacccgaacctgggccctccccacctacaacaaccacctctacaagcaaatc
tccagccaatcgggannnagcaccaacgacaacacctacttcggctacagcaccccctgg
gggtattttgactttaacagattccactgccacttctcaccacgtgactggcagcgactc
atcaacaacaactggggattccggcccaagnnnctcaacttcaagctcttcaacatccag
gtcaaggaggtcacgacgaatgatggcaccacgaccatcgccaataaccttaccagcacg
gttcaggtctttacggactcggaataccagctcccgtacgtcctcggctctgcgcaccag
ggctgcctgcctccgttcccggcggacgtcttcatgattcctcagtacgggtacctgact
ctgaacaatggcagtcaggccgtgggccgttcctccttctactgcctggagtactttcct
tctcaaatgctgagaacgggcaacaactttnnnttcagctacacgtttgaggacgtgcct
tttcacagcagctacgcgcacagccaaagcctggaccggctgatgaaccccctcatcgac
cagtacctgtactacctgtctcggactcagaccacgagtggtaccgcaggaaatcggnnn
ttgcaattttctcaggccgggcctagtagcatggcgaatcaggccaaaaactggctaccc
gggccctgctaccggcagcaacgcgtctccaagacannnaatcaaaataacaacagcaac
tttgcctggaccggtgccaccaagtatcatctgaatggcagagactctctggtaaatccc
ggtcccgctatggcaacccacaaggacgacgaagacaaattttttccgatgagcggagtc
ttaatatttgggaaacagggagctggaaatagcaacgtggaccttgacaacgttatgata
accnnngaggaagaaattaaaaccaccaacccagtggccacagaannntacggcacggtg
gccactaacctgcaatcgnnnaacaccgctcctgctacagggaccgtcaacagtcaagga
gccttacctggcatggtctggcagnnncgggacgtgtacctgcagggtcctatctgggcc
aagattcctcacacggacggacactttcatccctcgccgctgatgggaggctttggactg
aaacacccgcctcctcagatcctgattaagaatacacctgttcccgcgaatcctccaact
accttcagtccagctaagtttgcgtcgttcatcacgcagtacagcaccggacaggtcagc
gtggaaattgaatgggagctgcagaaagaaaacagcaaacgctggaacccagagattcaa
tacacttccaactacaacaaatctacaaatgtggactttgctgttgacacaaatggcgtt
tattctgagcctcgccccatcggcacccgttacctcacccgtaatctg
<222> (502) . . . (504)
<223> This region may encompass “aag” or “aaa”
<222> (613) . . . ( 615)
<223> This region may encompass “gca” or “agc”
<222> (796) . . . (798)
<223> This region may encompass “gca” or “ggc”
<222> (931) . . . (933)
<223> This region may encompass “aga” or “aag”
<222> (1231) . . . (1233)
<223> This region may encompass “gag” or “cag”
<222> (1378) . . . (1380)
<223> This region may encompass “acg” or “gag”
<222> (1477) . . . (1479)
<223> This region may encompass “gcg” or “acc”
<222> (1684) . . . (1686)
<223> This region may encompass “agt” or “aac”
<222> (1726) . . . (1728)
<223> This region may encompass “cag” or “gag”
<222> (1759) . . . (1761)
<223> This region may encompass “tca” or “gcc”
<222> (1825) . . . (1827)
<223> This region may encompass “aac” or “gac”
(nucleic acid encoding Anc81 scaffold)
SEQ ID NO: 148
atggctgccgatggttatcttccagattggctcgaggacaacctctctgagggcattcgc
gagtggtgggacttgaaacctggagccccgaaacccaaagccaaccagcaaaagcaggac
gacggccggggtctggtgcttcctggctacaagtacctcggacccttcaacggactcgac
aagggggagcccgtcaacgcggcggacgcagcggccctcgagcacgacaaggcctacgac
cagcagctcaaagcgggtgacaatccgtacctgcggtataaccacgccgacgccgagttt
caggagcgtctgcaagaagatacgtcttttgggggcaacctcgggcgagcagtcttccag
gccaagaagcgggttctcgaacctctcggtctggttgaggaaggcgctaagacggctcct
ggaaagaagagaccggtagagcaatcaccccaggaaccagactcctctnnnggcatcggc
aagaaaggccagcagcccgcgnnnaagagactcaactttgggcagactggcgactcagag
tcagtgcccgaccctcaaccactcggagaaccccccgcagccccctctggtgtgggatct
aatacaatggctgcaggcggtggcgctccaatggcagacaataacgaaggcgccgacgga
gtgggtaatgcctcaggaaattggcattgcgattccacatggctgggcgacagagtcatc
accaccagcacccgaacctgggccctccccacctacaacaaccacctctacaagcaaatc
tccnnnnnncaatcgggaggaagcaccaacgacaacacctacttcggctacagcaccccc
tgggggtattttgactttaacagattccactgccacttctcaccacgtgactggcagcga
ctcatcaacaacaactggggattccggcccaagnnnctcaacttcaagctcttcaacatc
caggtcaaggaggtcacgacgaatgatggcaccacgaccatcgccaataaccttaccagc
acggttcaggtctttacggactcggaataccagctcccgtacgtcctcggctctgcgcac
cagggctgcctgcctccgttcccggcggacgtcttcatgattcctcagtacgggtacctg
actctgaacaatggcagtcaggccgtgggccgttcctccttctactgcctggagtacttt
ccttctcaaatgctgagaacgggcaacaactttnnnttcagctacacgtttgaggacgtg
ccttttcacagcagctacgcgcacagccaaagcctggaccggctgatgaaccccctcatc
gaccagtacctgtactacctgtctcggactcagaccacgggaggtaccgcaggaaatnnn
nnnttgcaattttctcaggccgggcctagtagcatggcgaatcaggccaaaaactggcta
cccgggccctgctaccggcagcaacgcgtctccaagacaacgaatcaaaataacaacagc
aactttgcctggaccggtgccaccaagtatcatctgaatggcagagactctctggtaaat
cccggtgtcgctatggcaacccacaaggacgacgaagaccgattttttccgtccagcgga
gtcttaatatttgggaaacagggagctggaaatnnnaacgtggacnnnnnnaacgttatg
ataaccnnngaggaagaaattaaaaccaccaacccagtggccacagaagagtacggcnnn
gtggccactaacctgcaatcgnnnaacaccgctcctcaaacagggaccgtcaacagtcaa
ggagccttacctggcatggtctggcagaaccgggacgtgtacctgcagggtcctatctgg
gccaagattcctcacacggacggaaactttcatccctcgccgctgatgggaggctttgga
ctgaaacacccgcctcctcagatcctgattaagaatacacctgttcccgcgaatcctcca
actaccttcnnnccagctaagtttgcgtcgttcatcacgcagtacagcaccggacaggtc
agcgtggaaattgaatgggagctgcagaaagaaaacagcaaacgctggaacccagagatt
caatacacttccaactacaacaaatctacaaatgtggactttgctgttgacacagaaggc
gtttattctgagcctcgccccatcggcacccgttacctcacccgtaatctg
<222> (469) . . . (471)
<223> This region may encompass “acg” or “agc”
<222> (502) . . . (504)
<223> This region may encompass “aaa” or “aag”
<222> (784) . . . (786)
<223> This region may encompass “aac” or “agt”
<222> (787) . . . (789)
<223> This region may encompass “agc” or “cac”
<222> (934) . . . (936)
<223> This region may encompass “aga” or “aag”
<222> (1234) . . . (1236)
<223> This region may encompass “gag” or “cag”
<222> (1378) . . . (1380)
<223> This region may encompass “cgg” or “cag”
<222> (1381) . . . (1383)
<223> This region may encompass “acg” or “gag”
<222> (1654) . . . (1656)
<223> This region may encompass “gac” or “agc”
<222> (1666) . . . (1668)
<223> This region may encompass “ctt” or “tac”
<222> (1669) . . . (1671)
<223> This region may encompass “gac” or “agc”
<222> (1687) . . . (1689)
<223> This region may encompass “agt” or “aac”
<222> (1738) . . . (1740)
<223> This region may encompass “gtg” or “atc”
<222> (1762) . . . (1764)
<223> This region may encompass “gca” or “agc”
<222> (1990) . . . (1992)
<223> This region may encompass “agt” or “acc”
(nucleic acid encoding Anc110 scaffold)
SEQ ID NO: 149
atggctgccgatggttatcttccagattggctcgaggacaacctctctgagggcattcgc
gagtggtgggacttgaaacctggagccccgaaacccaaagccaaccagcaaaagcaggac
gacggccggggtctggtgcttcctggctacaagtacctcggacccttcaacggactcgac
aagggggagcccgtcaacgcggcggacgcagcggccctcgagcacgacaaagcctacgac
cagcagctcaaagcgggtgacaatccgtacctgcggtataatcacgccgacgccgagttt
caggagcgtctgcaagaagatacgtcttttgggggcaacctcgggcgagcagtcttccag
gccaagaagcgggttctcgaacctctcggtctggttgaggaaggcgctaagacggctcct
ggaaagaagaggccggtagagcagtcgccacaagagccagactcctconnnggcatcggc
aagacaggccagcagcccgctnnnaagagactcaattttggtcagactggcgactcagag
tcagtccccgacccacaacctctcggagaacctccagcagccccctcaggtgtgggatct
aatacaatggcttcaggcggtggcgctccaatggcagacaataacgaaggcgccgacgga
gtgggtaattcctcgggaaattggcattgcgattccacatggctgggggacagagtcatc
accaccagcacccgaacctgggccctgcccacctacaacaaccacctctacaagcaaatc
tccaacggcacctcgggaggaagcaccaacgacaacacctattttggctacagcaccccc
tgggggtattttgacttcaacagattccactgtcacttttcaccacgtgactggcaacga
ctcatcaacaacaattggggattccggcccaaaagactcaacttcaagctgttcaacatc
caggtcaaggaagtcacgacgaacgaaggcaccaagaccatcgccaataatctcaccagc
accgtgcaggtctttacggactcggagtaccagttaccgtacgtgctaggatccgctcac
cagggatgtctgcctccgttcccggcggacgtcttcatgattcctcagtacggctattta
actttaaacaatggaagccaagccgtgggacgttcctccttctactgtctggagtatttc
ccatcgcagatgctgagaaccggcaacaactttcagttcagctacaccttcgaggacgtg
cctttccacagcagctacgcgcacagccagagcctggacaggctgatgaatcccctcatc
gaccagtacctgtactacctgtccagaacgcaaacgactggaactnnngggacgcagact
ctgnnnttcagccaagcgggtcctagctcaatggccaaccaggctagaaattgggtgccc
ggaccttgctaccggcagcagcgcgtctccacgacaaccaaccagaacaacaacagcaac
tttgcctggacgggagctnnnaagnnnnnnctgaacggccgagactctctaatgaatccg
ggcgtggcaatggcttcccacaaggatgacgaggaccgcttcttcccttcgagcggggtc
ctgatttttggcaagcaaggagccgggaacgataatgtggattacagcnnngtgatgatt
acaaatgaggaagaaatcaagactaccaaccccgtggccacagaagaatatggagcagtg
gccaccaacnnncagnnngccaatacgcaggcgcagaccggactcgtgcacaaccagggg
gtgcttcccggcatggtgtggcagaatagagacgtgtacctgcagggtcccatctgggcc
aaaattcctcacacggacggcaactttcacccgtctcccctgatgggcggctttggactg
aagcacccgcctcctcaaattctcatcaagaacacaccggttccagcggacccgccgact
accttcaaccaggccaagctgaactctttcatcacgcagtacagcaccggacaggtcagc
gtggaaatcgagtgggagctgcagaaagaaaacagcaaacgctggaatccagagattcaa
tacacttccaactactacaaatctacaaatgtggactttgctgtcaacacggagggggtt
tatagcgagcctcgccccattggcacccgttacctcacccgcaacctgtaa
<222> (469) . . . (471)
<223> This region may encompass “tcg” or “acg”
<222> (502) . . . (504)
<223> This region may encompass “aaa” or “aga”
<222> (1366) . . . (1368)
<223> This region may encompass “gca” or “gga”
<222> (1384) . . . (1386)
<223> This region may encompass “caa” or “gca”
<222> (1519) . . . (1521)
<223> This region may encompass “acc” or “gcc”
<222> (1525) . . . (1527)
<223> This region may encompass “tat” or “ttt”
<222> (1528) . . . (1530)
<223> This region may encompass “cac” or “aaa”
<222> (1669) . . . (1671)
<223> This region may encompass “caa” or “aac”
<222> (1750) . . . (1752)
<223> This region may encompass “aac” or “cac”
<222> (1756) . . . (1758)
<223> This region may encompass “tcc” or “gcc”
(nucleic acid encoding Anc126 scaffold)
SEQ ID NO: 150
atggctgccgatggttatcttccagattggctcgaggacaacctctctgagggcattcgc
gagtggtgggacttgaaacctggagccccgaaacccaaagccaaccagcaaaagcaggac
gacggccggggtctggtgcttcctggctacaagtacctcggacccttcaacggactcgac
aagggggagcccgtcaacgcggcggatgcagcggccctcgagcacgacaaggcctacgac
cagcagctcaaagcgggtgacaatccgtacctgcggtataaccacgccgacgccgagttt
caggagcgtctgcaagaagatacgtcttttgggggcaacctcgggcgagcagtcttccag
gccaagaagagggttctcgaacctcttggtctggttgaggaaggtgctaagacggctcct
ggaaagaaacgtccggtagagcagtcgccacaagagccagactcctcctcgggcattggc
aagnnnggccagcagcccgctnnnaagagactcaattttggtcagactggcgactcagag
tcagtccccgacccacaacctctcggagaacctccagcagccccctctggtgtgggatct
aatacaatggcttcaggcggtggcgcaccaatggcagacaataacgaaggcgccgacgga
gtgggtaatnnntcaggaaattggcattgcgattccacatggctgggcgacagagtcatc
accaccagcacccgaacatgggccttgcccacctataacaaccacctctacaagcaaatc
tccagtcaatcaggggccagcaacgacaaccactacttcggctacagcaccccctggggg
tattttgatttcaacagattccactgccatttctcaccacgtgactggcagcgactcatc
aacaacaattggggattccggcccaagnnnctcaacttcaagctcttcaacatccaagtc
aaggaggtcacgacgaatgatggcaccacgaccatcgctaataaccttaccagcacggtt
caagtcttcacggactcggagtaccagttgccgtacgtcctcggctctgcgcaccagggc
tgcctccctccgttcccggcggacgtgttcatgattccgcagtacggctacctaacgctc
aacaatggcagccaggcagtgggacggtcatccttttactgcctggaatatttcccatcg
cagatgctgagaacgggcaataactttnnnttcagctacaccttcgaggacgtgcctttc
cacagcagctacgcgcacagccagagcctggaccggctgatgaatcctctcatcgaccag
tacctgtattacctgnnnagaactcagactacgtccggaactgcccaaaacagggagttg
nnntttagccaggcgggtccatctagcatgnnnaatcaggccaaaaactggctacctgga
ccctgttaccggcagcagcgcgtttctaaaacagcaaatgacaacaacaacagcaacttt
gcctggactggtgctacaaaatatcaccttaatgggcgtgattctttagtcaaccctggc
cctgctatggcctcacacaaagacgacgaagacaagttctttcccatgagcggtgtcttg
atttttggaaagcagggcgccggagcttcaaacgttgatttggacaatgtcatgatcaca
gacgaagaggaaatcaaaaccactaaccccgtggccaccgaacaatatgggactgtggca
accaatctccagagcagcaacacagcccctgcgaccggaactgtgaattctcagggagcc
ttacctggaatggtgtggcaagacagagacgtatacctgcagggtcctatttgggccaaa
attcctcacacggatggacactttcacccgtctcctctcatgggcggctttggacttaag
cacccgcctcctcagatcctcatcaaaaacacgcctgttcctgcgaatcctccgacaacg
ttttcgcctgcaaagtttgcttcattcatcacccagtattccacaggacaagtgagcgtg
gagattgaatgggagctgcagaaagaaaacagcaaacgctggaatcccgaaatacagtat
acatctaactataataaatctnnnaacgttgatttcactgtggacaccaatggagtttat
agtgagcctcgccccattggcacccgttacctcacccgtaacctg
<222> (484) . . . (486)
<223> This region may encompass “tca” or “aca”
<222> (502) . . . (504)
<223> This region may encompass “aaa” or “aga”
<222> (670) . . . (672)
<223> This region may encompass “gcc” or “tcc”
<222> (928) . . . (930)
<223> This region may encompass “aga” or “aaa”
<222> (1228) . . . (1230)
<223> This region may encompass “acc” or “cag”
<222> (1336) . . . (1338)
<223> This region may encompass “agc” or “aac”
<222> (1381) . . . (1383)
<223> This region may encompass “cag” or “ctg”
<222> (1411) . . . (1413)
<223> This region may encompass “gct” or “tct”
<222> (2122) . . . (2124)
<223> This region may encompass “gcc” or “acc”
(nucleic acid encoding Anc127 scaffold)
SEQ ID NO: 151
atggctgctgacggttatcttccagattggctcgaggacaacctttctgaaggcattcgt
gagtggtgggatctgaaacctggagcccctcaacccaaagcgaaccaacaacaccaggac
gacnnncggggtcttgtgcttccgggttacaaatacctcggaccctttaacggactcgac
aaaggagagccggtcaacgaggcggacgcggcagccctcgaacacgacaaagcttacgac
cagcagctcaaggccggtgacaacccgtacctcaagtacaaccacgccgacgccgagttt
caggagcgtcttcaagaagatacgtcttttgggggcaaccttggcagagcagtcttccag
gccaaaaagagggtccttgagcctcttggtctggttgaggaagcagctaaaacggctcct
ggaaagaagaggcctgtagaacagtctcctcaggaaccggactcatcatctggtattggc
aaatcgggccaacagcctgccnnnaaaagactaaatttcggtcagactggagactcagag
tcagtcccagaccctcaacctctcggagaaccaccagcagccccctcaggtgtgggatct
aatacaatggcttcaggcggtggcgcaccaatggcagacaataacgagggtgccgatgga
gtgggtaattcctcaggaaattggcattgcgattccacatggctgggcgacagagtcatc
accaccagcaccagaacctgggccctgcccacttacaacaaccatctctacaagcaaatc
tccagccaatcaggagcttcaaacgacaaccactactttggctacagcaccccttggggg
tattttgactttaacagattccactgccacttctcaccacgtgactggcagcgactcatt
aacaacaactggggattccggcccaagnnnctcaacttcaagctcttcaacatccaagtt
aaagaggtcacgcagaacgatggcacgacgactattgccaataaccttaccagcacggtt
caagtgtttacggactcggagtatcagctcccgtacgtgctcgggtcggcgcaccaaggc
tgtctcccgccgtttccagcggacgtcttcatgatccctcagtatggatacctcaccctg
aacaacggaagtcaagcggtgggacgctcatccttttactgcctggagtacttcccttcg
cagatgctaaggactggaaataacttcnnnttcagctataccttcgaggatgtacctttt
cacagcagctacgctcacagccagagtttggatcgcttgatgaatcctcttattgatcag
tatctgtactacctgnnnagaacgcaaacaacctctggaacaacccaacaatcacggctg
nnntttagccaggctgggccttcgtctatgnnncagcaggccnnnaattggctacctggg
ccctgctaccggcaacagagagtttcaaagactgctaacgacaacaacaacagtaacttt
gcttggacannngccaccaaatatcatctcaatggccgcgactcgctggtgaatccagga
ccagctatggccagtcacaaggacgatgaagaaaaatttttccctatgcacggcnnncta
atatttggcaaacaagggacaggggcaagtaacgtagatttagataatgtaatgattacg
gatgaagaagagattcgtaccaccaatcctgtggcaacagagcagtatggaactgtggca
actaacttgcagagctcaaatacagctcccgcgactggaactgtcaatagtcagggggcc
ttacctggcatggtgtggcaagatcgtgacgtgtaccttcaaggacctatctgggcaaag
attcctcacacggatggacactttcatccttctcctctgatgggaggctttggactgaaa
catccgcctcctcaaatcttgatcaaaaatactccggtaccggcaaatcctccgacgact
ttcagcccggccaagtttgcttcatttatcactcagtactccactggacaggtcagcgtg
gaaattgagtgggagctacagaaagaaaacagcaaacgttggaatccagagattcagtac
acttccaactacaacaagtctgttaatgtggactttactgtagacactaatggtgtttat
agtgaacctcgccctattggaacccggtatctcacacgaaacttg
<222> (124) . . . (126)
<223> This region may encompass “ggt” or “agt”
<222> (502) . . . (504)
<223> This region may encompass “aga” or “aaa”
<222> (928) . . . (930)
<223> This region may encompass “aaa” or “aga”
<222> (1228) . . . (1230)
<223> This region may encompass “aca” or “cag”
<222> (1336) . . . (1338)
<223> This region may encompass “agc” or “aga”
<222> (1381) . . . (1383)
<223> This region may encompass “caa” or “ctc”
<222> (1411) . . . (1413)
<223> This region may encompass “gct” or “tct”
<222> (1423) . . . (1425)
<223> This region may encompass “aaa” or “aga”
<222> (1510) . . . (1512)
<223> This region may encompass “ggg” or “gcg”
<222> (1615) . . . (1617)
<223> This region may encompass “gtt” or “gac”
(nucleic acid encoding AAV2 vp1)
SEQ ID NO: 152
ATGGCTGCCGATGGTTATCTTCCAGATTGGCTCGAGGACACTCTCTCTGAAGGAATAAGACAGTG
GTGGAAGCTCAAACCTGGCCCACCACCACCAAAGCCCGCAGAGCGGCATAAGGACGACAGCAGGG
GTCTTGTGCTTCCTGGGTACAAGTACCTCGGACCCTTCAACGGACTCGACAAGGGAGAGCCGGTC
AACGAGGCAGACGCCGCGGCCCTCGAGCACGACAAAGCCTACGACCGGCAGCTCGACAGCGGAGA
CAACCCGTACCTCAAGTACAACCACGCCGACGCGGAGTTTCAGGAGCGCCTTAAAGAAGATACGT
CTTTTGGGGGCAACCTCGGACGAGCAGTCTTCCAGGCGAAAAAGAGGGTTCTTGAACCTCTGGGC
CTGGTTGAGGAACCTGTTAAGACGGCTCCGGGAAAAAAGAGGCCGGTAGAGCACTCTCCTGTGGA
GCCAGACTCCTCCTCGGGAACCGGAAAGGCGGGCCAGCAGCCTGCAAGAAAAAGATTGAATTTTG
GTCAGACTGGAGACGCAGACTCAGTACCTGACCCCCAGCCTCTCGGACAGCCACCAGCAGCCCCC
TCTGGTCTGGGAACTAATACGATGGCTACAGGCAGTGGCGCACCAATGGCAGACAATAACGAGGG
CGCCGACGGAGTGGGTAATTCCTCGGGAAATTGGCATTGCGATTCCACATGGATGGGCGACAGAG
TCATCACCACCAGCACCCGAACCTGGGCCCTGCCCACCTACAACAACCACCTCTACAAACAAATT
TCCAGCCAATCAGGAGCCTCGAACGACAATCACTACTTTGGCTACAGCACCCCTTGGGGGTATTT
TGACTTCAACAGATTCCACTGCCACTTTTCACCACGTGACTGGCAAAGACTCATCAACAACAACT
GGGGATTCCGACCCAAGAGACTCAACTTCAAGCTCTTTAACATTCAAGTCAAAGAGGTCACGCAG
AATGACGGTACGACGACGATTGCCAATAACCTTACCAGCACGGTTCAGGTGTTTACTGACTCGGA
GTACCAGCTCCCGTACGTCCTCGGCTCGGCGCATCAAGGATGCCTCCCGCCGTTCCCAGCAGACG
TCTTCATGGTGCCACAGTATGGATACCTCACCCTGAACAACGGGAGTCAGGCAGTAGGACGCTCT
TCATTTTACTGCCTGGAGTACTTTCCTTCTCAGATGCTGCGTACCGGAAACAACTTTACCTTCAG
CTACACTTTTGAGGACGTTCCTTTCCACAGCAGCTACGCTCACAGCCAGAGTCTGGACCGTCTCA
TGAATCCTCTCATCGACCAGTACCTGTATTACTTGAGCAGAACAAACACTCCAAGTGGAACCACC
ACGCAGTCAAGGCTTCAGTTTTCTCAGGCCGGAGCGAGTGACATTCGGGACCAGTCTAGGAACTG
GCTTCCTGGACCCTGTTACCGCCAGCAGCGAGTATCAAAGACATCTGCGGATAACAACAACAGTG
AATACTCGTGGACTGGAGCTACCAAGTACCACCTCAATGGCAGAGACTCTCTGGTGAATCCGGGC
CCGGCCATGGCAAGCCACAAGGACGATGAAGAAAAGTTTTTTCCTCAGAGCGGGGTTCTCATCTT
TGGGAAGCAAGGCTCAGAGAAAACAAATGTGGACATTGAAAAGGTCATGATTACAGACGAAGAGG
AAATCAGGACAACCAATCCCGTGGCTACGGAGCAGTATGGTTCTGTATCTACCAACCTCCAGAGA
GGCAACAGACAAGCAGCTACCGCAGATGTCAACACACAAGGCGTTCTTCCAGGCATGGTCTGGCA
GGACAGAGATGTGTACCTTCAGGGGCCCATCTGGGCAAAGATTCCACACACGGACGGACATTTTC
ACCCCTCTCCCCTCATGGGTGGATTCGGACTTAAACACCCTCCTCCACAGATTCTCATCAAGAAC
ACCCCGGTACCTGCGAATCCTTCGACCACCTTCAGTGCGGCAAAGTTTGCTTCCTTCATCACACA
GTACTCCACGGGACAGGTCAGCGTGGAGATCGAGTGGGAGCTGCAGAAGGAAAACAGCAAACGCT
GGAATCCCGAAATTCAGTACACTTCCAACTACAACAAGTCTGTTAATGTGGACTTTACTGTGGAC
ACTAATGGCGTGTATTCAGAGCCTCGCCCCATTGGCACCAGATACCTGACTCGTAATCTGTAA

The application's sequence listing, which the Patent Office published only in electronic form, follows.

SEQUENCE LISTING (153 sequences)

SEQ ID NO: 1 - protein, 735 aa, Adeno-associated virus [sequence omitted]

SEQ ID NO: 2 - protein, 738 aa, Adeno-associated virus
MAADGYLPDWLEDNLSEGIREWWDLKPGAPKPKANQQKQDDGRGLVLPGYKYLGPFNGLDKGEPVNAADAAALEHDKAYDQQLKAGDNPYLRYNHADAEFQERLQEDTSFGGNLGRAVFQAKKRVLEPLGLVEEAAKTAPGKKRPVEPSPQRSPDSSTGIGKKGQQPARKRLNFGQTGDSESVPDPQPIGEPPAAPSSVGSGTMAAGGGAPMADNNEGADGVGSSSGNWHCDSTWLGDRVITTSTRTWALPTYNNHLYKQISNGTSGGSTNDNTYFGYSTPWGYFDFNRFHCHFSPRDWQRLINNNWGFRPKRLSFKLFNIQVKEVTQNEGTKTIANNLTSTIQVFTDSEYQLPYVLGSAHQGCLPPFPADVFMIPQYGYLTLNNGSQAVGRSSFYCLEYFPSQMLRTGNNFSFSYTFEDVPFHSSYAHSQSLDRLMNPLIDQYLYYLSRTQSTGGTAGTQQLLFSQAGPSNMSAQARNWLPGPCYRQQRVSTTLSQNNNSNFAWTGATKYHLNGRDSLVNPGVAMATNKDDEDRFFPSSGILMFGKQGAGKDNVDYSNVMLTSEEEIKTTNPVATEQYGVVADNLQQQNTAPIVGAVNSQGALPGMVWQNRDVYLQGPIWAKIPHTDGNFHPSPLMGGFGLKHPPPQILIKSTPVPADPPTAFNQAKLNSFITQYSTGQVSVEIEWELQKENSKCWNPEIQYTSNYYKSTNVDFAVNTEGVYSEPRPIGTRYLTRNL

SEQ ID NO: 3 - protein, 738 aa, Adeno-associated virus
MAADGYLPDWLEDNLSEGIREWWDLKPGAPKPKANQQKQDDGRGLVLPGYKYLGPFNGLDKGEPVNAADAAALEHDKAYDQQLKAGDNPYLRYNHADAEFQERLQEDTSFGGNLGRAVFQAKKRVLEPLGLVEEAAKTAPGKKRPVEPSPQRSPDSSTGIGKKGQQPAKKRLNFGQTGDSESVPDPQPIGEPPAGPSGLGSGTMAAGGGAPMADNNEGADGVGSSSGNWHCDSTWLGDRVITTSTRTWALPTYNNHLYKQISNGTSGGSTNDNTYFGYSTPWGYFDFNRFHCHFSPRDWQRLINNNWGFRPKRLSFKLFNIQVKEVTQDEGTKTIANNLTSTIQVFTDSEYQLPYVLGSAHQGCLPPFPADVFMIPQYGYLTLNNGSQAVGRSSFYCLEYFPSQMLRTGNNFEFSYTFEDVPFHSSYAHSQSLDRLMNPLIDQYLYYLSRTQSTGGTQGTQQLLFSQAGPANMSARAKNWLPGPCYRQQRVSTTLSQNNNSNFAWTGATKYHLNGRDSLVNPGVAMATHKDDEERFFPSSGVLMFGKQGAGRDNVDYSSVMLTSEEEIKTTNPVATEQYGVVADNLQQANTGPIVGNVNSQGALPGMVWQNRDVYLQGPIWAKIPHTDGNFHPSPLMGGFGLKHPPPQILIKNTPVPADPPTTFSQAKLASFITQYSTGQVSVEIEWELQKENSKRWNPEIQYTSNYYKSTNVDFAVNSEGTYSEPRPIGTRYLTRNL

SEQ ID NO: 4 - protein, 736 aa, Adeno-associated virus
MAADGYLPDWLEDNLSEGIREWWDLKPGAPKPKANQQKQDDGRGLVLPGYKYLGPFNGLDKGEPVNAADAAALEHDKAYDQQLKAGDNPYLRYNHADAEFQERLQEDTSFGGNLGRAVFQAKKRVLEPLGLVEEGAKTAPGKKRPVEQSPQEPDSSSGIGKTGQQPAKKRLNFGQTGDSESVPDPQPLGEPPATPAAVGPTTMASGGGAPMADNNEGADGVGNASGNWHCDSTWLGDRVITTSTRTWALPTYNNHLYKQISSASTGASNDNHYFGYSTPWGYFDFNRFHCHFSPRDWQRLINNNWGFRPKRLNFKLFNIQVKEVTTNDGVTTIANNLTSTVQVFSDSEYQLPYVLGSAHQGCLPPFPADVFMIPQYGYLTLNNGSQAVGRSSFYCLEYFPSQMLRTGNNFTFSYTFEEVPFHSSYAHSQSLDRLMNPLIDQYLYYLNRTQNQSGSAQNKDLLFSRGSPAGMSVQPKNWLPGPCYRQQRVSKTKTDNNNSNFTWTGASKYNLNGRESIINPGTAMASHKDDEDKFFPMSGVMIFGKESAGASNTALDNVMITDEEEIKATNPVATERFGTVAVNFQSSSTDPATGDVHAMGALPGMVWQDRDVYLQGPIWAKIPHTDGHFHPSPLMGGFGLKNPPPQILIKNTPVPANPPAEFSATKFASFITQYSTGQVSVEIEWELQKENSKRWNPEVQYTSNYAKSANVDFTVDNNGLYTEPRPIGTRYLTRPL

SEQ ID NO: 5 - protein, 736 aa, Adeno-associated virus
MAADGYLPDWLEDNLSEGIREWWDLKPGAPKPKANQQKQDDGRGLVLPGYKYLGPFNGLDKGEPVNAADAAALEHDKAYDQQLKAGDNPYLRYNHADAEFQERLQEDTSFGGNLGRAVFQAKKRVLEPFGLVEEGAKTAPGKKRPVEQSPQEPDSSSGIGKTGQQPAKKRLNFGQTGDSESVPDPQPLGEPPATPAAVGPTTMASGGGAPMADNNEGADGVGNASGNWHCDSTWLGDRVITTSTRTWALPTYNNHLYKQISSASTGASNDNHYFGYSTPWGYFDFNRFHCHFSPRDWQRLINNNWGFRPKRLNFKLFNIQVKEVTTNDGVTTIANNLTSTVQVFSDSEYQLPYVLGSAHQGCLPPFPADVFMIPQYGYLTLNNGSQAVGRSSFYCLEYFPSQMLRTGNNFTFSYTFEDVPFHSSYAHSQSLDRLMNPLIDQYLYYLNRTQNQSGSAQNKDLLFSRGSPAGMSVQPKNWLPGPCYRQQRVSKTKTDNNNSNFTWTGASKYNLNGRESIINPGTAMASHKDDKDKFFPMSGVMIFGKESAGASNTALDNVMITDEEEIKATNPVATERFGTVAVNLQSSSTDPATGDVHVMGALPGMVWQDRDVYLQGPIWAKIPHTDGHFHPSPLMGGFGLKHPPPQILIKNTPVPANPPAEFSATKFASFITQYSTGQVSVEIEWELQKENSKRWNPEVQYTSNYAKSANVDFTVDNNGLYTEPRPIGTRYLTRPL

SEQ ID NO: 6 - protein, 736 aa, Adeno-associated virus
MAADGYLPDWLEDNLSEGIREWWALKPGVPQPKANQQHQDNRRGLVLPGYKYLGPGNGLDKGEPVNEADAAALEHDKAYDQQLKAGDNPYLKYNHADAEFQERLQEDTSFGGNLGRAVFQAKKRILEPLGLVEEAAKTAPGKKGAVDQSPQEPDSSSGVGKSGKQPARKRLNFGQTGDSESVPDPQPLGEPPAAPTSLGSNTMASGGGAPMADNNEGADGVGNSSGNWHCDSQWLGDRVITTSTRTWALPTYNNHLYKQISSQSGASNDNHYFGYSTPWGYFDFNRFHCHFSPRDWQRLINNNWGFRPKKLSFKLFNIQVRGVTQNDGTTTIANNLTSTVQVFTDSEYQLPYVLGSAHQGCLPPFPADVFMVPQYGYLTLNNGSQAVGRSSFYCLEYFPSQMLRTGNNFQFSYTFEDVPFHSSYAHSQSLDRLMNPLIDQYLYYLNRTQGTTSGTTNQSRLLFSQAGPQSMSLQARNWLPGPCYRQQRLSKTANDNNNSNFPWTAASKYHLNGRDSLVNPGPAMASHKDDEEKFFPMHGNLIFGKEGTTASNAELDNVMITDEEEIRTTNPVATEQYGTVANNLQSSNTAPTTGTVNHQGALPGMVWQDRDVYLQGPIWAKIPHTDGHFHPSPLMGGFGLKHPPPQIMIKNTPVPANPPTTFSPAKFASFITQYSTGQVSVEIEWELQKENSKRWNPEIQYTSNYNKSVNVDFTVDTNGVYSEPRPIGTRYLTRNL

SEQ ID NO: 7 - protein, 736 aa, Adeno-associated virus
MAADGYLPDWLEDNLSEGIREWWALQPGAPKPKANQQHQDNARGLVLPGYKYLGPGNGLDKGEPVNAADAAALEHDKAYDQQLKAGDNPYLKYNHADAEFQERLKEDTSFGGNLGRAVFQAKKRLLEPLGLVEEAAKTAPGKKRPVDQSPQEPDSSSGVGKSGKQPARKRLNFGQTGDSESVPDPQPLGEPPAAPTSLGSNTMASGGGAPMADNNEGADGVGNSSGNWHCDSQWLGDRVITTSTRTWALPTYNNHLYKQISSQSGASNDNHYFGYSTPWGYFDFNRFHCHFSPRDWQRLINNNWGFRPKKLSFKLFNIQVKEVTQNDGTTTIANNLTSTVQVFTDSEYQLPYVLGSAHQGCLPPFPADVFMVPQYGYLTLNNGSQAVGRSSFYCLEYFPSQMLRTGNNFQFSYTFEDVPFHSSYAHSQSLDRLMNPLIDQYLYYLNRTQGTTSGTTNQSRLLFSQAGPQSMSLQARNWLPGPCYRQQRLSKTANDNNNSNFPWTAASKYHLNGRDSLVNPGPAMASHKDDEEKFFPMHGNLIFGKEGTTASNAELDNVMITDEEEIRTTNPVATEQYGTVANNLQSSNTAPTTRTVNDQGALPGMVWQDRDVYLQGPIWAKIPHTDGHFHPSPLMGGFGLKHPPPQIMIKNTPVPANPPTTFSPAKFASFITQYSTGQVSVEIEWELQKENSKRWNPEIQYTSNYNKSVNVDFTVDTNGVYSEPRPIGTRYLTRPL

SEQ ID NO: 8 - protein, 737 aa, Adeno-associated virus
MAADGYLPDWLEDNLSEGIREWWDLKPGAPKPKANQQKQDNGRGLVLPGYKYLGPFNGLDKGEPVNAADAAALEHDKAYDQQLKAGDNPYLRYNHADAEFQERLQEDTSFGGNLGRAVFQAKKRVLEPLGLVEEGAKTAPAKKRPVEPSPQRSPDSSTGIGKKGQQPARKRLNFGQTGDSESVPDPQPLGEPPAAPSSVGSGTVAAGGGAPMADNNEGADGVGNASGNWHCDSTWLGDRVITTSTRTWALPTYNNHLYKQISSETAGSTNDNTYFGYSTPWGYFDFNRFHCHFSPRDWQRLINNNWGFRPKKLRFKLFNIQVKEVTTNDGVTTIANNLTSTIQVFSDSEYQLPYVLGSAHQGCLPPFPADVFMIPQYGYLTLNNGSQSVGRSSFYCLEYFPSQMLRTGNNFEFSYSFEDVPFHSSYAHSQSLDRLMNPLIDQYLYYLARTQSNPGGTAGNRELQFYQGGPSTMAEQAKNWLPGPCFRQQRVSKTLDQNNNSNFAWTGATKYHLNGRNSLVNPGVAMATHKDDEDRFFPSSGVLIFGKTGATNKTTLENVLMTNEEEIRPTNPVATEEYGIVSSNLQAANTAAQTQVVNNQGALPGMVWQNRDVYLQGPIWAKIPHTDGNFHPSPLMGGFGLKHPPPQILIKNTPVPANPPEVFTPAKFASFITQYSTGQVSVEIEWELQKENSKRWNPEIQYTSNFEKQTGVDFAVDSQGVYSEPRPIGTRYLTRNL

SEQ ID NO: 9 - protein, 738 aa, Adeno-associated virus
MAADGYLPDWLEDNLSEGIREWWALKPGAPKPKANQQKQDDGRGLVLPGYKYLGPFNGLDKGEPVNAADAAALEHDKAYDQQLQAGDNPYLRYNHADAEFQERLQEDTSFGGNLGRAVFQAKKRVLEPLGLVEEGAKTAPGKKRPVEPSPQRSPDSSTGIGKKGQQPARKRLNFGQTGDSESVPDPQPLGEPPAAPSGVGPNTMAAGGGAPMADNNEGADGVGSSSGNWHCDSTWLGDRVITTSTRTWALPTYNNHLYKQISNGTSGGATNDNTYFGYSTPWGYFDFNRFHCHFSPRDWQRLINNNWGFRPKRLSFKLFNIQVKEVTQNEGTKTIANNLTSTIQVFTDSEYQLPYVLGSAHQGCLPPFPADVFMIPQYGYLTLNNGSQAVGRSSFYCLEYFPSQMLRTGNNFQFTYTFEDVPFHSSYAHSQSLDRLMNPLIDQYLYYLSRTQTTGGTANTQTLGFSQGGPNTMANQAKNWLPGPCYRQQRVSTTTGQNNNSNFAWTAGTKYHLNGRNSLANPGIAMATHKDDEERFFPSNGILIFGKQNAARDNADYSDVMLTSEEEIKTTNPVATEEYGIVADNLQQQNTAPQIGTVNSQGALPGMVWQNRDVYLQGPIWAKIPHTDGNFHPSPLMGGFGLKHPPPQILIKNTPVPADPPTTFNQSKLNSFITQYSTGQVSVEIEWELQKENSKRWNPEIQYTSNYYKSTSVDFAVNTEGVYSEPRPIGTRYLTRNL

SEQ ID NO: 10 - protein, 738 aa, Adeno-associated virus
MAADGYLPDWLEDNLSEGIREWWDLKPGAPKPKANQQKQDDGRGLVLPGYKYLGPFNGLDKGEPVNAADAAALEHDKAYDQQLKAGDNPYLRYNHADAEFQERLQEDTSFGGNLGRAVFQAKKRVLEPLGLVEEAAKTAPGKKRPVEPSPQRSPDSSTGIGKKGQQPAKKRLNFGQTGDSESVPDPQPIGEPPAGPSGLGSGTMAAGGGAPMADNNEGADGVGSSSGNWHCDSTWLGDRVITTSTRTWALPTYNNHLYKQISNGTSGGSTNDNTYFGYSTPWGYFDFNRFHCHFSPRDWQRLINNNWGFRPKRLSFKLFNIQVKEVTQNEGTKTIANNLTSTIQVFTDSEYQLPYVLGSAHQGCLPPFPADVFMIPQYGYLTLNNGSQAVGRSSFYCLEYFPSQMLRTGNNFEFSYTFEDVPFHSSYAHSQSLDRLMNPLIDQYLYYLSRTQSTGGTQGTQQLLFSQAGPANMSAQAKNWLPGPCYRQQRVSTTLSQNNNSNFAWTGATKYHLNGRDSLVNPGVAMATHKDDEERFFPSSGVLMFGKQGAGRDNVDYSSVMLTSEEEIKTTNPVATEQYGVVADNLQQTNTGPIVGNVNSQGALPGMVWQNRDVYLQGPIWAKIPHTDGNFHPSPLMGGFGLKHPPPQILIKNTPVPADPPTTFSQAKLASFITQYSTGQVSVEIEWELQKENSKRWNPEIQYTSNYYKSTNVDFAVNTEGTYSEPRPIGTRYLTRNL

SEQ ID NO: 11 - protein, 738 aa, Adeno-associated virus
MAADGYLPDWLEDNLSEGIREWWDLKPGAPKPKANQQKQDDGRGLVLPGYKYLGPFNGLDKGEPVNAADAAALEHDKAYDQQLKAGDNPYLRYNHADAEFQERLQEDTSFGGNLGRAVFQAKKRVLEPLGLVEEGAKTAPGKKRPVEPSPQRSPDSSTGIGKKGQQPAKKRLNFGQTGDSESVPDPQPIGEPPAGPSGLGSGTMAAGGGAPMADNNEGADGVGSSSGNWHCDSTWLGDRVITTSTRTWALPTYNNHLYKQISNGTSGGSTNDNTYFGYSTPWGYFDFNRFHCHFSPRDWQRLINNNWGFRPKRLNFKLFNIQVKEVTQNEGTKTIANNLTSTIQVFTDSEYQLPYVLGSAHQGCLPPFPADVFMIPQYGYLTLNNGSQAVGRSSFYCLEYFPSQMLRTGNNFEFSYQFEDVPFHSSYAHSQSLDRLMNPLIDQYLYYLSRTQSTGGTAGTQQLLFSQAGPNNMSAQAKNWLPGPCYRQQRVSTTLSQNNNSNFAWTGATKYHLNGRDSLVNPGVAMATHKDDEERFFPSSGVLMFGKQGAGKDNVDYSSVMLTSEEEIKTTNPVATEQYGVVADNLQQQNAAPIVGAVNSQGALPGMVWQNRDVYLQGPIWAKIPHTDGNFHPSPLMGGFGLKHPPPQILIKNTPVPADPPTTFSQAKLASFITQYSTGQVSVEIEWELQKENSKRWNPEIQYTSNYYKSTNVDFAVNTDGTYSEPRPIGTRYLTRNL

SEQ ID NO: 12 - protein, 736 aa, Adeno-associated virus
MAADGYLPDWLEDNLSEGIREWWALKPGAPQPKANQQHQDNARGLVLPGYKYLGPGNGLDKGEPVNAADAAALEHDKAYDQQLKAGDNPYLKYNHADAEFQERLKEDTSFGGNLGRAVFQAKKRLLEPLGLVEEAAKTAPGKKRPVEQSPQEPDSSAGIGKSGAQPAKKRLNFGQTGDTESVPDPQPIGEPPAAPSGVGSLTMASGGGAPVADNNEGADGVGSSSGNWHCDSQWLGDRVITTSTRTWALPTYNNHLYKQISNSTSGGSSNDNAYFGYSTPWGYFDFNRFHCHFSPRDWQRLINNNWGFRPKRLNFKLFNIQVKEVTDNNGVKTIANNLTSTVQVFTDSDYQLPYVLGSAHEGCLPPFPADVFMIPQYGYLTLNDGSQAVGRSSFYCLEYFPSQMLRTGNNFQFSYEFENVPFHSSYAHSQSLDRLMNPLIDQYLYYLSKTINGSGQNQQTLKFSVAGPSNMAVQGRNYIPGPSYRQQRVSTTVTQNNNSEFAWPGASSWALNGRNSLMNPGPAMASHKEGEDRFFPLSGSLIFGKQGTGRDNVDADKVMITNEEEIKTTNPVATESYGQVATNHQSAQAQAQTGWVQNQGILPGMVWQDRDVYLQGPIWAKIPHTDGNFHPSPLMGGFGMKHPPPQILIKNTPVPADPPTAFNKDKLNSFITQYSTGQVSVEIEWELQKENSKRWNPEIQYTSNYYKSNNVEFAVNTEGVYSEPRPIGTRYLTRNL

SEQ ID NO: 13 - protein, 736 aa, Adeno-associated virus
MAADGYLPDWLEDNLSEGIREWWALKPGAPQPKANQQHQDNARGLVLPGYKYLGPGNGLDKGEPVNEADAAALEHDKAYDQQLKAGDNPYLKYNHADAEFQERLKEDTSFGGNLGRAVFQAKKRLLEPLGLVEEAAKTAPGKKRPVEQSPQEPDSSVGIGKSGAQPAKKRLNFGQTGDTESVPDPQPIGEPPAAPSGVGSLTMASGGGAPVADNNEGADGVGSSSGNWHCDSQWLGDRVITTSTRTWALPTYNNHLYKQISNSTSGGSSNDNAYFGYSTPWGYFDFNRFHCHFSPRDWQRLINNNWGFRPKRLNFKLFNIQVKEVTDNNGVKTIANNLTSTVQVFTDSDYQLPYVLGSAHEGCLPPFPADVFMIPQYGYLTLNDGSQAVGRSSFYCLEYFPSQMLRTGNNFQFSYEFENVPFHSSYAHSQSLDRLMNPLIDQYLYYLSKTINGSGQNQQTLKFSVAGPSNMAVQGRNYIPGPSYRQQRVSTTVTQNNNSEFAWPGASSWALNGRNSLMNPGPAMASHKEGEDRFFPLSGSLIFGKQGTGRDNVDADKVMITNEEEIKTTNPVATESYGQVATNHQSAQAQQATGWVQNQGILPGMVWQDRDVYLQGPIWAKIPHTDGNFHPSPLMGGFGMKHPPPQILIKNTPVPADPPTAFNKDKLNSFITQYSTGQVSVEIEWELQKENSKRWNPEIQYTSNYYKSNNVEFAVNTEGVYSEPRPIGTRYLTRNL

SEQ ID NO: 14 - protein, 738 aa, Adeno-associated virus
MAADGYLPDWLEDNLSEGIREWWDLKPGAPKPKANQQKQDDGRGLVLPGYKYLGPFNGLDKGEPVNAADAAALEHDKAYDQQLKAGDNPYLRYNHADAEFQERLQEDTSFGGNLGRAVFQAKKRVLEPLGLVEEAAKTAPGKKRPVEPSPQRSPDSSTGIGKKGQQPAKKRLNFGQTGESESVPDPQPIGEPPAGPSGLGSGTMAAGGGAPMADNNEGADGVGSSSGNWHCDSTWLGDRVITTSTRTWALPTYNNHLYKQISNGTSGGSTNDNTYFGYSTPWGYFDFNRFHCHFSPRDWQRLINNNWGFRPKRLSFKLFNIQVKEVTQNEGTKTIANNLTSTIQVFTDSEYQLPYVLGSAHQGCLPPFPADVFMIPQYGYLTLNNGSQAVGRSSFYCLEYFPSQMLRTGNNFEFSYTFEDVPFHSSYAHSQSLDRLMNPLIDQYLYYLSRTQSTGGTQGTQQLLFSQAGPANMSAQAKNWLPGPCYRQQRVSTTLSQNNNSNFAWTGATKYHLNGRDSLVNPGVAMATHKDDEERFFPSSGVLMFGKQGAGRDNVDYSSVMLTSEEEIKTTNPVATEQYGVVADNLQQANTGPIVGNVNSQGALPGMVWQNRDVYLQGPIWAKIPHTDGNFHPSPLMGGFGLKHPPPQILIKNTPVPADPPTTFSQAKLASFITQYSTGQVSVEIEWELQKENSKRWNPEIQYTSNYYKSTNVDFAVNTEGTYSEPRPIGTRYLTRNL

SEQ ID NO: 15 - protein, 724 aa, Adeno-associated virus
MSFVDHPPDWLEEVGEGLREFLGLEAGPPKPKPNQQHQDQARGLVLPGYNYLGPGNGLDRGEPVNRADEVAREHDISYNEQLEAGDNPYLKYNHADAEFQEKLADDTSFGGNLGKAVFQAKKRVLEPFGLVEEGAKTAPTGKRIDDHFPKRKKARTEEDSKPSTSSDAEAGPSGSQQLQIPAQPASSLGADTMSAGGGGPLGDNNQGADGVGNASGDWHCDSTWMGDRVVTKSTRTWVLPSYNNHQYREIKSGSVDGSNANAYFGYSTPWGYFDFNRFHSHWSPRDWQRLINNYWGFRPRSLRVKIFNIQVKEVTVQDSTTTIANNLTSTVQVFTDDDYQLPYVVGNGTEGCLPAFPPQVFTLPQYGYATLNRDNTENPTERSSFFCLEYFPSKMLRTGNNFEFTYNFEEVPFHSSFAPSQNLFKLANPLVDQYLYRFVSTNNTGGVQFNKNLAGRYANTYKNWFPGPMGRTQGWNLGSGVNRASVSAFATTNRMELEGASYQVPPQPNGMTNNLQGSNTYALENTMIFNSQPANPGTTATYLEGNMLITSESETQPVNRVAYNVGGQMATNNQSSTTAPATGTYNLQEIVPGSVWMERDVYLQGPIWAKIPETGAHFHPSPAMGGFGLKHPPPMMLIKNTPVPGNITSFSDVPVSSFITQYSTGQVTVEMEWELKKENSKRWNPEIQYTNNYNDPQFVDFAPDSTGEYRTTRPIGTRYLTRPL

SEQ ID NO: 16 - protein, 736 aa, Adeno-associated virus; identical to SEQ ID NO: 6

SEQ ID NO: 17 - protein, 734 aa, Adeno-associated virus
MTDGYLPDWLEDNLSEGVREWWALQPGAPKPKANQQHQDNARGLVLPGYKYLGPGNGLDKGEPVNAADAAALEHDKAYDQQLKAGDNPYLKYNHADAEFQQRLQGDTSFGGNLGRAVFQAKKRVLEPLGLVEQAGETAPGKKRPLIESPQQPDSSTGIGKKGKQPAKKKLVFEDETGAGDGPPEGSTSGAMSDDSEMRAAAGGAAVEGGQGADGVGNASGDWHCDSTWSEGHVTTTSTRTWVLPTYNNHLYKRLGESLQSNTYNGFSTPWGYFDFNRFHCHFSPRDWQRLINNNWGMRPKAMRVKIFNIQVKEVTTSNGETTVANNLTSTVQIFADSSYELPYVMDAGQEGSLPPFPNDVFMVPQYGYCGLVTGNTSQQQTDRNAFYCLEYFPSQMLRTGNNFEITYSFEKVPFHSMYAHSQSLDRLMNPLIDQYLWGLQSTTTGTTLNAGTATTNFTKLRPTNFSNFKKNWLPGPSIKQQGFSKTANQNYKIPATGSDSLIKYETHSTLDGRWSALTPGPPMATAGPADSKFSNSQLIFAGPKQNGNTATVPGTLIFTSEEELAATNATDTDMWGNLPGGDQSNSNLPTVDRLTALGAVPGMVWQNRDIYYQGPIWAKIPHTDGHFHPSPLIGGFGLKHPPPQIFIKNTPVPANPATTFSSTPVNSFITQYSTGQVSVQIDWEIQKERSKRWNPEVQFTSNYGQQNSLLWAPDAAGKYTEPRAIGTRYLTHHL

SEQ ID NO: 18 - protein, 736 aa, Adeno-associated virus; identical to SEQ ID NO: 4

SEQ ID NO: 19 - protein, 736 aa, Adeno-associated virus
MAADGYLPDWLEDTLSEGIRQWWKLKPGPPPPKPAERHKDDSRGLVLPGYKYLGPFNGLDKGEPVNEADAAALEHDKAYDRQLDSGDNPYLKYNHADAEFQERLKEDTSFGGNLGRAVFQAKKRVLEPLGLVEEGAKTAPGKKRPVEQSPQEPDSPSGIGKTGQQPAKKRLNFGQTGDSESVPDPQPLGEPPATPAAVGPTTMASGGGAPMADNNEGADGVGNASGNWHCDSTWLGDRVITTSTRTWALPTYNNHLYKQISSASTGASNDNHYFGYSTPWGYFDFNRFHCHFSPRDWQRLINNNWGFRPKRLNFKLFNIQVKEVTTNDGVTTIANNLTSTVQVFSDSEYQLPYVLGSAHQGRLPPFPADVFMIPQYGYLTLNNGSQAVGRSSSYCLEYFPSQMLRTGNNFTFSYTFEEVPLHSSCAHSQSLDRLMNPLIDQYLYYLNRTQNQSGSAQNRDLLFSRGSPAGMSVQPKNWLPGPCYRQQRVSKTKTDNNNSNFTWTGASKYNLNGRESIINPGTAMASHKDDEDKFFPMSGVMIFGKESAGASNTALDNVMITDEEEIKATNPVATERFGTVAVNFQSSSTDPATGDVHAMGALPGMVWQDRDVYLQGPIWAKIPHTDGHFHPSPLMGGFGLKNPPPQILIKNTPVPANPPAEFSATKFASFITQYSAGQVSVEIEWELQKENSKRWNPEVQYTSNYAKSANVDFTVDNNGLYTEPRPIGTRYLTRPL

SEQ ID NO: 20 - protein, 736 aa, Adeno-associated virus
MAADGYLPDWLEDNLSEGIREWWDLKPGAPKPKANQQKQDDGRGLVLPGYKYLGPFNGLDKGEPVNAADAAALEHDKAYDQQLKAGDNPYLRYNHADAEFQERLQEDTSFGGNLGRAVFQAKKRVLEPLGLVEEGAKTAPGKKRPVEQSPQEPDSSSGIGKTGQQPAKKRLNFGQTGDSESVPDPQPLGEPPATPAAVGPTTMASGGGAPMADNNEGADGVGNASGNWHCDSTWLGDRVITTSTRTWALPTYNNHLYKQISSTSTGASNDNHYFGYGTPWGYFDFNRFHCHFSPRDWQRLINNNWGFRPKRLNFKLFNIQVEEVTTNDGVTTIANNLTSTVQVFSDSEYQLPYVLGSAHQGCLPPFPADVFMIPQYGYLTLNNGSQAVGRSSFYCLEYFPSQMLRTGNNFTFSYTFEEVPFHSSYAHSQSLDRLMNPLIDQYLYYLNRTQNQSGSAQNKDLLFSRGSPAGMSVQPKNWLPGPCYRQQRVSKTKTDNNNSNFTWTGASKYNLNGRESIINPGTAVASHKDDEDKFFPMSGVMIFGKESAGASSTALDNVMITDEEEIKATNPVATERFGTVAVNFQSSSTDPATGDVHAMGALPGMVWQDRDVYLQGPIWAKIPHTDGHFHPSPLMGGFGLKNPPPQILIKNTPVPANPPAEFSATKFASFITQYSTGQVSVEIEWELQKENSKRWNPEVQYTSNYAKSANVDFTVDNNGLYTEPRPIGTRYLTRPL

SEQ ID NO: 21 - protein, 736 aa, Adeno-associated virus
MAADGYLPDWLEDTLSEGIRQWWKLRPGPPPPKPAERHKDDSRGLVLPGYKYLGPFNGLDKGEPVNEADAAALEHDKAYDRQLDSGDNPYLKYNHADAEFQERLKEDTSFGGNLGRAVFQAKKRVLEPLGLVEEGAETAPGKKRPVEQSPQGPDSSSGIGKTGQQPAKKRLNFGQTGDSESVPDPQPLGEPPATPAAVGPTTMASGGGAPMADNNEGADGVGNASGNWHCDSTWLGDRVITTSTRTWALPTYNNHLYKQISSASTGASNDNHYFGYSTPWGYFDFNRFHCHFSPRDWQRLINNNWGFRPKRLNFKLFNIQVKEVTTNDGVTTIANNLTSTVQVFSDSEYQLPYVLGSAHQGCLPPFPADVFMIPQYGYLTLNNGSQAVGRSSFYCLEYFPSQMLRTGNNFTFSYTFEEVPFHSSYAHSQSLDRLMNPLIDQYLYYPNRTQNQSGSAQNKDLLFSRGSPAGMSVQPKNWLPGPCYRQQRVSKTKTDNNNSNFTWTGASKYNLNGRESIINPGTAMASHKDDEDKFFPMSGVMIFGKESAGASNTALDNVMITDEEEIKATNPVATERFGTVAVNFQSSSTDPATGDVHAMGALPGMVWQGRDVYLQGPIWAKIPHTDGHFHPSPLMGGFGLKNPPPQILIKNTPVPANPPAEFSATKFASFITQYSTGQVSVEIEWELQKENSKRWNPEVQYTSNYAKSANVDFTVDNNGLYTEPRPIGTRYLTRPL

SEQ ID NO: 22 - protein, 736 aa, Adeno-associated virus
MAADGYLPDWLEDNLSEGIREWWDLKPGAPKPKANQQKQDDGRGLVLPGYKYLGPFNGLDKGEPVNAADAAALEHDKAYDQQLKAGDNPYPRYNHADAEFQERLQEDTPFGGNLGRAVFQAKKRVLEPLGLVEEAAKTAPGKKRPVEPSPQRSPDSSTGIGKKGQQPAKKRLNFGQTGDSESVPDPQPIGEPPAGPSGLGSGTMAAGGGAPMADNNEGADGVGNASGNWHCDSTWLGDRVITTSTRTWALPTYNNHLYKQISSASTGASNDNHYFGYSTPWGYFDFNRFHCHFSPRDWQRLINNNWGFRPKRLNFKLFNIQVKEVTTNDGVTTIANNLTSTVQVFSDSEYQLPYVLGSAHQGCLPPFPADVFMIPQYGYLTLNNGSQAVGRSSFYCLEYFPSQMLRTGNNFTFSYTFEEVPLHSSYAHSQSLDRLMNPLIVQYLYYLNRTQNQSGSAQNKDLLFSRGSPAGMSVQPKNWLPGPCYRQQRVSKTKTDNNNSNFTWTGASKYNLNGRESIINPGTAMASHKDDEDKFFPMSGVMIFGKESAGASNTALDNVMITDEEEIKATNPVATERFGTVAVNFQSSSTDPATGDVHAMGALPGMVWQDRDVYLQGPIWAKIPHTDGHFHPSPLMGGFGLKNPPPQILIKNTPVPANPPAEFSATKFASFITQYSTGQVSVEIEWELQKENSKRWNPEVQYTSNYAKSASVDFTVDNNGLYTEPRPIGTRYLTRP

SEQ ID NO: 23 - protein, 736 aa, Adeno-associated virus; identical to SEQ ID NO: 5

SEQ ID NO: 24 - protein, 735 aa, Adeno-associated virus
MAADGYLPDWLEDTLSEGIRQRWKLKPGPPPPEPAERHKDDSRGLVLPGYKYLGPFNGLDKGEPVNEADAAALEHDKAYDRQLDSGDNPYLKYNHADAEFQERLKEDTSFGGNLGRAVFQAKKRVLEPLGLVEEPVKTAPGKKRPVEHSPVEPDSSSGTGKAGQQPARKRLNFGQTGDADSVPDPQPLGQPPAAPSGLGTNTMATGSGAPMADNNEGADGVGNSSGNWHCDSTWMGDRVITTSTRTWALPTYNNHLYKQISSQSGASNDNHYFGYSTPWGYFDFNRFHCHFSPRDWQRLINNNWGFRPKRLNFKLFNIQVKEVTQNDGTTTIANNLTSTVQVFTDSEYQLPYVLGSAHQGCLPPFPADVFMVPQYGYLTLNNESQAVGRSSFYCLEYFPSQMLRTGNNFTFSYTFEDVPFHSSYAHSQSLGRLMNPLIDQYLYYLSRTNTPSGTTTQSRLQFSQAGASDIRDQSRNWLPGPCYRQQRVSKTSADNNNSEYSWTGATKYHLNGRDSLVNPGPAMASHKDDEEKFFPQSGVLIFGKQGSEKTNVDIEKVMITDEEEIRTTNPVATEQYGSVSTNLQRGNRQAATADVNTQGVLPGMVWQDRDVYLQGPIWAKIPHTDGHFHPSPLMGGFGLKHPPPQILIKNTPVPANPSTTFSAAKFASFITQYSTGQVSVEIEWELQKENSKRWNPEIQYTSNYNKSVNVDFTVDTNGVYSEPRPIGTRYLTRNL

SEQ ID NO: 25 - protein, 735 aa, Adeno-associated virus
MAADGYLPDWLEDTLSEGIRQWWKLKPGPPPPKPAERHRDDSRGLVLPGYKYLGPFNGLDKGEPVNEADAAALEHDKAYDRQLDSGDNPYLKYNHADAEFQERLKEDTSFGGNLGRAVFQAKKRVLEPLGLVGEPVKTAPGKKRPVEHSPVEPDSSSGTGKAGQQPARKRLNFGQTGDADSVPDPQPLGQPPAAPSGLGTNTMATGSGAPMADNNEGADGVGNSSGNWHCDSTWMGDRVITTSTRTWALPTYNNHLYKQISSQSGASNDSHYFGYSTPWGYFDFNRFHCHFSPRDWQRLINNNWGFRPKRLNFKLFNIQVKEVTQNDGTTTIANNLTSTVQVFTDSEYQLPYVLGSAHQGCLPPFPADVFMVPQYGYLTLNNGSQAVGRSSFYCLEYFPSQMLRTGNNFTFSYTFEDVPFHSSYAHSQSLDRLMNPLIDQYLYYLSTTNTPSGTTTQSRLQFSQAGASDIRDQSRNWLPGPCYRQQRVSKTSADNNNSEYSWTGATKYHLNGRDSLVNPGPAMASHKDNEEKFFPQSGVLIFGKQGSEKTNVDIEKVMITDEEEIRTTNPVATEQYGSVSTNLQRGNRQAATADVNTQGVLPGMVWQDRDVYLQGPIWAKIPHTDGHFHPSPLMGGFGLKHPPPQILIKNTPVPANPSTTFSAAKFASFITQYSTGQVSVEIEWELQKENSKRWNPEIQYTSNYNKSVNVDFTVDTNGVYSEPRPIGTRYLTRNL

SEQ ID NO: 26 - protein, 735 aa, Adeno-associated virus
MAADGYLPDWLEDTLSEGIRQWWKLKPGPPPPKPAERHKDDSRGLVLPGYKYLGPFNGLDKGEPVNEADAAALEHDKAYDRQLDSGDNPYLKYNHADAEFQERLKEDTSFGGNLGRAVFQAKKRVLEPLGLVEEPVKTAPGKKRPVEHSPAEPDSSSGTGKSGNQPARKRLNFGQTGDSDSVPDPQPLGQPPAAPSGLGTNTMATGSGAPMADNNEGADGVGNSSGNWHCDSTWMGDRVITTSTRTWALPTYNNHLYKQISSQSGASNDNHYFGYSTPWGYFDFNRFHCHFSPRDWQRLINNNWGFRPKRLNFKLFNIQVKEVTQNDGTTTIANNLTSTVQVFTDSEYQLPYVLGSAHQGCLPPFPADVFMVPQYGYLTLNNGSQAVGRSSFYCLGYFPSQMLRTGNNFTFSYTFEDVPFHSSYAHSQSLDRLMNPLIDQYLYYLSRTNTPSGTTTQSRLQFSQAGASDIRDQSRNWLPGPCYRQQRVSKTSADNNNSEYSWTGATKYHLNGRDSLVNPGPAMASHKDDEEKFFPQSGVLIFGKQGPEKTNVDIEKVMITDEEEIRTTNPVATEQYGSVSTNLQSGNTQAATADVNTQGVLPGMVWQDRDVYLQGPIWAKIPHTDGHFHPSPLMGGFGLKHPPPQILIKNTPVPANPSTTFSAAKFASFITQYSTGQVSVEIEWELQKENSKRWNPEIQYTSNYNKSVNVDFTVDTNGVYSEPRPIGTRYLTRNL

SEQ ID NO: 27 - protein, 735 aa, Adeno-associated virus
MAADGYLPDWLEDTLSEGIRQWWKLKPGPPPPKPAERHKDDSRGLVLPGYKYLGPFNGLDKGEPVNEADAAALEHDKAYDRQLDSGDNPYPKYNHADAEFQERLKEDTSFGGNLGRAVFQAKKRVLEPLGLVEEPVKTAPGKKRPVEHSPAEPDSSSGTGKAGQQPARKRLNFGQTGDADSVPDPQPLGQPPAAPSGLGTNTMATGSGAPMADNNEGADGVGNSSGNWHCDSTWMGDRVITTSTRTWALPTYNNHLYKQISSQSGASNDNHYFGYSTPWGYFDFNRFHCHFSPRDWQRLINNNWGFRPKRLNFKLFNIQVKEVTQNDGTTTIANNLTSTVQVFTDSEYQLPYVLGSAHQGCLPPFPADVFMVPQYGYLTLNNGSQAVGRSSFYCLEYFPSQMLRTGNNFTFSYTFEDVPFHSSYAHSQSLDRLMNPLIDQYLYYLSRTNTPSGTTTQSRLQFSQAGASDIRDQSRNWLPGPCYRQQRVSKTSADNNNSEYSWTGATKYHLNGRDSLVNPGPAMASHKDDEEKFFPQSGVLIFGKQDSGKTNVDIEKVMITDEEEIRTTNPVATEQYGSVSTNLQSGNTQAATSDVNTQGVLPGMVWQDRDVYLQGPIWAKIPHTDGHFHPSPLMGGFGLKHPPPQILIKNTPVPANPSTTFSAAKFASFITQYSTGQVSVEIEWELQKENSKRWNPEIQYTSNYNKSVNVDFTVDTNGVYSEPRPIGTRYLTRNL

SEQ ID NO: 28 - protein, 735 aa, Adeno-associated virus
MAADGYLPDWLEDTLSEGIRQWWKLKPGPPPPKPAERHKDDSRGLVLPGYKYLGPFNGLDKGEPVNEADAAALEHDKAYDRQLDSGDNPYLKYNHADAEFQERLKEDTSFGGNLGRAVFQAKKRVLEPLGLVEEPVKTAPGKKRPVEHSPVEPDSSSGTGKAGNQPARKRLNFGQTGDADSVPDPQPLGQPPASPSGLGTNTMATGSGAPMADNNEGADGVGNSSGNWHCDSTWMGDRVVTTSTRTWALPTYNNHLYKQISSQSGASNDNHYFGYSTPWGYFDFNRFHCHFSPRDWQRLINNNWGFRPKRLNFKLFNIQVKEVTQNDGTTTIANNLTSTVQVFTDLEYQLPYVLGSAHQGCLPPFPADVFMVPQYGYLTLNNGSQAVGRSSFYCLEYFPSQMLRTGNNFTFSYTFEDVPFHSSYAHSQSLDRLMNPLIDQYLYYLSRTNTPSGTTTQSRLQFSQAGASDIRDQSRNWLPGPCYRQQRVSKTAADNNNSEYSWTGATKYHLNGRDSLVNPGPAMASHKDDEEKFFPQSGVLIFGKQGSEKTNVDIEKVMITDEEEIRTTNPVATEQYGSVSTNLQSGNTQAATSDVNTQGVLPGMVWQDRDVYLQGPIWAKIPHTDGHFHPSPLMGGFGLKHPPPQILIKNTPVPANPSTTFSAAKFASFITQYSTGQVSVEIEWELQKENSKRWNPEIQYTSNYNKSVNVDFTVDTNGVYSEPRPIGTRYLTRNL

SEQ ID NO: 29 - protein, 735 aa, Adeno-associated virus
MAADGYLPDWLEDTLSEGIRQWWKLKPGPPPPKPAERHRDDSRGLVLPGYKYLGPFNGLDKGEPVNEADAAALEHDKAYDRQLDSGDNPYLKYNHADAEFQERLKEDTSFGGNLGRAVFQAKKRVLEPLGLVEEPVKTAPGKKRPVEHSPVEPDSSSGTGKAGQQPARKRLNFGQTGDADSVPDPQPLGQPPAAPSGLGTNTMATGSGAPMADNNEGADGVGNSSGNWHCDSTWMGDRVITTSTRTWALPTYNNHLYKQISSQSGASNDNHYFGYSTPWGYFDFNRFHCHFSPRDWQRLINNNWGFRPKRLNFKLFNIQVKEVTQNDGTTTIANNLTSTVQVFTDSGYQLPYVLGSAHQGCLPPFPADVFMVPQYGYPTLNNGSQAVGRSSFYCLEYFPSQMLRTGNNFTFSYTFEDVPFHSSYAHSQSLDRLMNPLIDQYLYYLSTTNTPSGTTTQSRLQFSQAGASDIRDQSRNWLPGPCYRQQRVSKTSADNNNSEYSWTGATKYHLNGRDSLVNPGPAVASHKDDEEKFFPQSGVLIFGKQGSEKTNVDIEKVMITDEEEIRTTNPVATEQYGSVSTNLQRGNRQAATADVNTQGVLPGMVWQDRDVYLQGPIWAKIPHTDGHFHPSPLMGGFGLKHPPPQILIKNTPVPANPSTTFSAAKFASFITQYSTGQVSVEIEWELQKENSKRWNPEIQYTSNYNKSVNVDFTVDTNGVYSEPRPIGTRYLTRNL

SEQ ID NO: 30 - protein, 734 aa, Adeno-associated virus
MAADGYLPDWLEDTLSEGIRQWWKLKPGPPPKPAERHKDDSRGLVLPGYKYLGPFNGLDKGEPVNEADAAALEHDKAYDRQLDSGDNPYLKYNHADAEFQERLKEDTSFGGNLGRAVFQAKKRVLEPLGLVEEPVKTAPGKKRPVEHSPVEPDSSSGTGKAGNQPARKRLNFGQTGDADSVPDPQPLGQPPAAPSGLGTNTMATGSGAPMADNNEGADGVGNSSGDWHCDSTWMGDRVITTSTRTWALPTYNNHLYKQISSQSGASNDNHYFGYSTPWGYFDFNRFHCHFSPRDWQRLINNNWGFRPKRLNLKLFNIQVKEVTQNDGTTTIANNLTSTVQVFTDLEYQLPYVLGSAHQGCLPPFPADVFMVPQYGYLTLNNGSQAVGRSSFYCLEYFPSQMLRTGNNFTFSYTFEDVPFHSSYAHSQSLDRLMNPLIDQYLYYLSRTNTPSGTTTQSRLQFSQAGASDIRDQSRNWLPGPCYRQQRVSKTAADNNNGEYSWTGATKYHLNGRDSLVNPGPAMASHKDDEEKFFPQSGVLIFGKQGSEKTNVDIEKVMITDEEEIRTTNPVATEQYGSVSTNLQSGNTRAATSDVNTQGVLPGMVWQDRDVYLQGPIWAKIPHTDGHFHPSPLMGGFGLKHPPPQILIKNTPVPANPSTTFSAAKFASFITQYSTGQVSVEIEWELQKENSKRWNPEIQYTSNYNKSVNVDFTVDTNGVYSEPRPIGTRYLTRNL

SEQ ID NO: 31 - protein, 735 aa, Adeno-associated virus
MAADGYLPDWLEDTLSEGIRQRWKLKPGPPPPEPAERHKDDSRGLVLPGYKYLGPFNGLDKGEPVNEADAAALEHDKAYDRQLDSGDNPYLKYNHADAEFQERLKEDTSFGGNLGRAVFQAKKRVLEPLGLVEEPVKTAPGKKRPVEHSPVEPDSSSGTGKAGQQPARKRLNFGQTGDADSVPDPQPLGQPPAAPSGLGTNTMATGSGAPMADNNEGADGVGNSSGNWHCDSTWMGDRVITTSTRTWALPTYNNHLYKQISSQSGASNDNHYFGYSTPWGYFDFNRFHCHFSPRDWQRLINNNWGFRPKRLNFKLFNIQVKEVTQNDGTTTIANNLTSTVQVFTDSEYQLPYVLGSAHQGCLPPFPADVFMVPQYGYLTLNNGSQAVGRSSFYCLEYFPSQMLRTGNNFTFSYTFEDVPFHSSYAHSQSLGRLMNPLIDQYLYYLSRTNTPSGTTTQSRLQFSQAGASDIRDQSRNWLPGPCYRQQRVSKTSADNNNSEYSWTGATKYHLNGRDSLVNPGPAMASHKDDEEKFFPQSGVLIFGKQGSEKTNVDIEKVMITDEEEIRTTNPVATEQYGSVSTNLQRGNRQAATADVNTQGVLPGMVWQDRDVYLQGPIWAKIPHTDGHFHPSPLMGGFGLKHPPPQILIKNTPVPANPSTTFSAAKFASFITQYSTGQVSVEIEWELQKENSKRWNPEIQYTSNYNKSVNVDFTVDTNGVYSEPRPIGTRYLTRNL

SEQ ID NO: 32 - protein, 735 aa, Adeno-associated virus
MAADGYLPDWLEDTLSEGIRQWWKLKPGPPPPKPAERHKDDSRGLVLPGYKYLGPFNGLDKGEPVNEADAAALEHDKAYDRQLDSGDNPYLKYDHADAEFQERLKEDTSFGGNLGRAVFQAKKRVLEPLGLVEEPVKTAPGKKRPVEHSPVEPDSSSGTGKAGNQPARKRLNFGQTGDADSVPDPQPLGQPPAAPSGLGTNTMATGSGAPMADNNDGADGVGNSSGNWHCDSTWMGDRVITTSTRTWALPTYNNHLYKQISSQSGASNDNHYFGYSTPWGYFDFNRFHCHFSPRDWQRLINNNWGFRPKRLNFKLFNIQVREVTQNDGTTTIANNLTSTVQVFTDSEYQLPYVLGSAHQGCLPPFPADVFMVPQYGYLTLNNGSQAVGRSSFYCLEYFPSQMLRTGNNFTFSYTFEDVPFHSSYAHSQSLDRLMNPLIDQYLYYLSRTNTPSGTTTQSRLQFSQAGASDIRDQSRNWLPGPCYRQQRVSKTSADNNNSEYSWIGATKYHLNGRDSLVNPGPAMASHKDDEEKFFPQSGVLIFGKQGSEKTNVDIEKVMITDEEEIRTTNPVATEQYGSVSTNLQSGNTQASTADVNTQGVLPGMVWQDRDVYLQGPIWAKIPHTDGHFHPSPLMGGFGLKHPPPQILIKNTPVPANPSTTFSAAKFASFITQYSTGRVSVEIEWELQKENSKRWNPEIQYTSNYNKSVNVDFTVDTNGVYSEPRPIGTRYLTRNL

SEQ ID NO: 33 - protein, 735 aa, Adeno-associated virus
MAADGYLPDWLEDTLSEGIRQWWKLKPGPPPPKPAERHKDDSRGLVLPGYKYLGPFNGLDKGEPVNEADAAALEHDKAYDRQLDSGDNPYLKYNHADAEFQERLKEDTSFGGNLGRAVFQAKKRVLEPLSLVEEPVKTAPGKKRPVEHSPAEPDSSSGTGKSGNQPARKRLNFGQTGDSDSVPDPQPLGQPPAAPSGLGTNTMATGSGAPMADNNEGADGVGNSSGNWHCDSTWMGDRVITTSTRTWALPTYNNHLYKQISSQSGASNDNHYFGYSTPWGYFDFNRFHCHFSPRDWQRLINNNWGFRPKRLNFKLFNIQVKEVTQNDGTTTIANNLTSTVQVFTDSEYQLPYVLGSAHQGCLPPFPADVFMVPQYGYLTLNNGSQAVGRSSFYCLEYFPSQMLRTGNNFTFSYTFEDVPFHSSYAHSQSLDRLMNPLIDQYLYYLSRTNTPSGTTTQSRLQFSQAGASDIQDQSRNWLPGPCYRQQRVSKTSADNNNSEYSWTGATKYHLNGRDSLVNPGPAMASHKDDEEKFFPQSGVLIFGKQGSEKTNVDIEKVMITDEEEIRTTNPVATEQYGSVSTNLQSGNTQAATADVNTQGVLPGMVGQDRDVYLQGPTWAKIPHTDGHFHPSPLMGGFGLKHPPPQILIKNTPVPANPSTTFSAAKFASFITQYSTGQVSVEIEWELQKENSKRWNPEIQYTSNYNKSVNVDFTVDTNGVYSEPRPIGTRYLTRNL

SEQ ID NO: 34 - protein, 735 aa, Adeno-associated virus
MAADGYLPDWLEDTLSEGIRQWWKLKPGPPPPKPAERHKDDSRGLVLPGYKYLGPFNGLDKGEPVNEADAAALEHDKAYDRQLDSGDNPYLKYNHADAEFQERLKEDTSFGGNLGRAVFQAKKRVLEPLGLVGEPVKTAPGKKRPVEHSPVEPDSSSGTGKAGQQPARKRLNFGQTGDADSVPDPQPLGQPPAAPSGLGTNTMATGSGAPMADNNEGADGVGNSSGNWHCDSTWMGDRVITTSTRTWALPTYNNHLYKQISSQSGASNDNHYFGYSTPWGYFDFNRFHCHFSPRDWQRLINNNWGFRPKRLNFKLFNIQVKEVTQNDGTTTIANNLTSTVQVFTDSEYQLPYVLGSAHQGCLPPFPADVFMVPQYGYLTLNNGSQAVGRSSFYCLEYFPSQMLRTGNNFTFSYTFEDVPFHSGYAHSQSLDRLMNPLIDQYLYYLSTTNTPSGTTTQSRLQFSQAGASDIRDQSRNWLPGPCYRQQRVSKTSADNNNSEYSWTGATKYHLNGRDSLVNPGPAMASHKDNEEKFFPQSGVLIFGKQGSEKTNVDIEKVMITDEEEIRTTNPVATEQYGSVSTNLQRGNRQAATADVNTQGVLPGMVWQDRDVYLQGPIWAKIPHTDGHFHPSPLMGGFGLKHPPPQILIKNTPVPANPSTTFSAAKFASFITQYSTGQVSVEIEWELQKENSKRWNPEIQYTSNYNKSVNVDFTVDTNGVYSEPRPIGTRYLTRNL

SEQ ID NO: 35 - protein, 735 aa, Adeno-associated virus
MAADGYLPDWLEDTLSEGIRQWWKLKPGPPPPKPAERHKDDSRGLVLPGYKYLGPFNGLDKGEPVNEADAAALEHDKAYDRQLDSGDNPYLKYNHADAEFQERLKEDTSFGGNLGRAVFQAKKRILEPLGLVEEPVKTAPGEKRPVEHSPAEPDSSSGTGKAGQQPARKRLNFGQTGDADSVPDPQPLGQPPAAPSGLGTNTMASGSGAPMADNNEGADGVGNSSGNWYCDSTWMGDRVITTSTRTWALPTYNNHLYKQISSQSGASNDNHYFGYSTPWGYFDFNRFHCHFSPRDWQRLINNNWGFRPKRLSFKLFNIQVKEVTQNDGTTTIANNLTSTVQVFTDSEYQLPYVLGSAHQGCLPPFPADVFMVPQYGYLTLNNGSQAVGRSSFYCLEYFPSQMLRTGNNFTFSYTFEDVPFHSSYAHSQSLDRLMNPLIDQYLYYLSRTNTPSGTTTMSRLQFSQAGASDIRDQSRNWLPGPCYRQQRVSKTAADNNNSDYSWTGATKYHLNGRDSLVNPGPAMASHKDDEEKYFPQSGVLIFGKQDSGKTNVDIEKVMITDEEEIRTTNPVATEQYGSVSTNLQSGNTQAATSDVNTQGVLPGMVWQDRDVYLQGPIWAKIPHTDGHFHPSPLVGGFGLKHPPPQILIKNTPVPANPSTTFSAAKFASFITQYSTGQVSVEIEWELQKENSKRWNPEIQYTSNYNKSVNVDFTVDTNGVYSEPRPIGTRYLTRNL

SEQ ID NO: 36 - protein, 735 aa, Adeno-associated virus
MAADGYLPDWLKDTLSEGIRQWWKLKPGPPPPKPAERHKDDSGGLVLPGYKYLGPFNGLDKGEPVNEADAAALEYDKAYDRQLDSGDNPYLKYNHADAEFQERLKEDTSFGGNLGRAVFQAKKRVLEPLGLVEEPVKTAPGKKRPVEHSPVEPDSSSGTGKAGQQPARKRLNFGQTGDADSVPDPQPLGQPPAAPSGLGTNTMATGSGAPMADNNEGADGVGNSSGSWHCDSTWMGDRVITTSTRTWALPTYNNHLYKQISSQSGASNDNHYFGYSTPWGYFDFNRFHCHFSPRDWQRLINNNWGFRPKRLNFKLFNIQVKEVTQNDGTTTIANNLTSTVQVFTDSEYQLPYVPGSAHQGCLPPFPADVFMVPQYGYLTLNNGSQAVGRSSFYCLEYFPSQMLRTGNNFTFSYTFEDVPFHSSYAHSQSLDRLMNPLIDQYLYYLSRTNTPSGTTTQSRLQFSQAGASDIRDQSRNWLPGPCYRQQRVSKTAADNNNSEYSWTGATKYHLNGRDSLVNPGPAMASHKDDEEKFFPQSGVLIFGKQGSEKTNVDIEKVMITDEEEIRTTNPVATEQYGSVSTNLQSGNTQAATADVNTQGVLPGMVWQDRDVHLQGPIWAKIPHTDGHFHPSPLMGGFGLKHPPPQILIKNTPVPANPSTTFSAAKFASFITQYSTGQVSVEIEWELQKENSKRWNPEIQYTSNYNKSVNVDFTVDTNGVYSEPRPIGTRYLTRNL

SEQ ID NO: 37 - protein, 735 aa, Adeno-associated virus
MAADGYLPDWLEDTLSEGIRQWWKLKPGPPPPKPAERHKDDSRGLVLPGYKYLGPFNGLDKGEPVNEADAAALEHDKAYDRQLDSGDNPYLKYNHADAEFQERLKEDTSFGGNLGRAVFQAKKRVLEPLGLVGEPVKTAPGKKRPVEHSPVEPDSSSGTGKAGQQPARKRLNFGQTGDADSVPDPQPLGQPPAAPSGLGTNTMATGSGAPMADNNEGADGVGNSSGNRHCDSTWMGDRVITTSTRTWALPTYNNHLYRQISSQSGASNDNHYFGYSTPWGYFDFNRFHCHFSPRDWQRLINNNWGFRPKRLNFKLFNIQVKEVTQNDGTTTIANNLTSTVQVFTDSEYQLPYVLGSAHQGCLPPFPADVFMVPQYGYLTLSNGSQAVGRSSFYCPEYFPSQMLRTGNNFTFSYTFEDVPFHSSYAHSQSLDRLMNPLIDQYLYYLSTTNTPSGTTTQSRLQFSQAGASDIRDQSRNWLPGPCYRQQRVSKTSADNNNSEYSWTGATKYHLNGRDSLVNPGPAMASHKDNEEKFFPQSGVLIFGKQGSEKTNVDIEKVMITDEEEIRTTNPVATEQYGSVSTNLQRGNRQAATADVNTQGVLPGMVWQDRDVYLQGPIWAKIPHTDGHFHPSPLMGGFGPKHPPPQILIKNTPVPANPSTTFSAAKFASFITQYSTGQVSVEIEWELQKENSKRWNPEIQYTSNYNKSVNVDFTVDTNGVYSEPRPIGTRYLTRNL

SEQ ID NO: 38 - protein, 735 aa, Adeno-associated virus
MAADGYLPDWLEDTLSEGIRQWWKLKPGPPPPKPAERHKDDSRGLVLPGYKYLGPFNGLDKGEPVNEADAAALEHDKAYDRQLDSGDNPYLKYNHADAEFQERLKEDTSFGGNLGRAVFQAKKRVLEPLGLVEEPVKTAPGKKRPVEHSPAEPDSSSGTGKAGQQPARKRLNFGQTGDADSVPDPQPLGQPPAAPSGLGTNTMASGSGAPMADNNEGADGVGNSSGNWHCDSTWMGDRVITTSTRTWALPTYNNHLYKQISSQSGASNDNHYFGYSTPWGYFDFNRFHCHFSPRDWQRLINNNWGFRPKRLNFKLFNIQVKEVTQNDGTTTIANNLTSTVQVFTDSEYQLPYVLGSAHQGCLPPFPADVFMVPQYGYLTLNNGSQAVGRSSFYCLEYFPSQMLRTGNNFTFSYTFEDVPFHSSYAHSQSLDRLMNPLIDQYLYYLSRTNTPSGTTTQSRLQFSQAGASDIRDQSRNWLPGPCYRQQRVSKTSADNNNSEYSWTGATKYHLNGRDSLVNPGPAMASHKDDEEKFFPQSGVLIFGKQGSEKTNVDIEKVMITDEEEIRTTNPVATEQYGSVSTNLQGGNTQAATADVNTQGVLPGMVWQDRDVYLQGPIWAKIPHTDGHFHPSPLMGGFGLKHPPPQILIKNTPVPANPSTTFSAAKFASFITQYSTGQVSVEIEWELQKENSKRWNPEIQYTSNYNKSVNVDFTVDTNGVYSEPRPIGTRYLTRNL

SEQ ID NO: 39 - protein, 735 aa, Adeno-associated virus [sequence omitted]

SEQ ID NO: 40 - protein, 735 aa, Adeno-associated virus
MAADGYLPDWLEDTLSEGIRQWWKLKPGPPPPKPAERHKDDSRGLVLPGYRYLGPFNGLDKGEPVNEADAAALEHDKAYDRQLDSGDNPYLKYNHVDAEFQERLKEDTSFGGNLGRAVFQAKKRILEPLGLVEEPVKAAPGEKRPVEHSPAEPDSSSGTGKAGQQPARKRLNFGQTGDADSVPDPQPLGQPPAAPSGLGTNTMASGSGAPMADNNEGADGVGNSSGNWHCDSTWMGDRVITTSTRTWALPTYNNHLYKQISSQSGASNDNHYFGYSTPWGHFDFNRFHCHFSPRDWQRLINNNWGFRPKRLSFKLFNIQVKEVTQNDGTTTIANNLTSTVQVFTDSEYQLPYVLGSAHQGCLPPFPADVFMVPQYGYLTLNNGSQAVGRSSFYCLEYFPSQMLRTGNNFTFSYTFEDVPFHSSYAHSQSLDRLMNPLIDQYLYYLSRTNTPSGTTTMSRLQFSQAGASDIRDQSRNWLPGPCYRQQRVSKTAADNNNSDYSWTGATKYHLNGRDSLVNPGPAMASHKDDEEKYFPQSGVLIFGKQDSGKTNVDIEKVMITDEEEIRTTNPVATEQYGSVSTNLQSGNTQAATSDVNTQGVLPGMVWQDRDVYLQGPIWAKIPHTDGHFHPSPPMGGFGLKHPPPQILIKNTPVPANPSTTFSAAKFASFITQYSTGQVSVEIEWELQKENSKRWNPEIQYTSNYNKSVNVDFTVDTNGVYSEPRPIGARYLTRNL

SEQ ID NO: 41 - protein, 735 aa, Adeno-associated virus
MAADGYLPDWLEDTLSEGIRQWWKLKPGPPPPKPAERHKDDSRGLVLPGYKYLGPFNGLDKGEPVNEADAAALEHDKAYDRQLDSGDNPYLKYNHADAEFQERLKEDTSFGGNLGRAVFQAKKRILEPLGLVEEPVKTAPGKKRPVEHSPAEPDSSSGTGKAGQQPARKRLNFGQTGDADSVPDPRPLGQPPAAPSGLGTNTMASGSGAPMADNNEGADGVGNSSGNWHCDSTWMGDRVITTSTRTWALPTYNNHLYKQISSQSGASNDNHYFGYSTPWGYFDFNRFHCHFSPRDWQRLINNNWGFRPKRLSFKLFNIQVKEVTQNDGTTTIANNLTSTVQVFTDSEYQLPYVLGSAHQGCLPPFPADVFMVPQYGYLTLNNGSQAVGRSSFYCLEYFPSQMLRTGNNFTFSYTFEDVPFHSSYAHSQSLDRLMNPLIDQYLYYLSRTNTPSGTTTMSRLQFSQAGASDIRDQSRNWLPGPCYRQQRVSKTAADNNNSDYSWTGATKYHLNGRDSLVNPGPAMASHKDDEEKYFPQSGVLIFGKQDSGKTNVDIEKVMITDEEEIRTTNPVATEQYGSVSTNLQSGNTQAATSDVNTQGVLPGMVWQDRDVYLQGPIWAKIPHTDGHFHPSPLMGGFGLKHPPPQILIKNTPVPANPSTTFSAAKFASFITQYSTGQVSVEIEWELQKENSKRWNPEIQYTSNYNKSVNVDFTVDTNGVYSEPRPIGTRYLTRNL

SEQ ID NO: 42 - protein, 735 aa, Adeno-associated virus
MAADGYLPDWLEDTLSEGIRQWWKLKPGPPPPKPAERHKDDSRGLVLPGYKYLGPFNGLDKGEPVNEADAAALEHDKAYDRQLDGGDNPYLKYNHADAEFQERLKEDTSFGGNLGRAVFQAKKRVLEPLGLVEEPVKTAPGKKRPVEHSLAEPDSSSGTGKAGQQPARRRLNFGQTGDADSVPDPQPLGQPPAAPSGLGTNTMATGSGAPMADNNEGADGVGNSSGNWHCDSTWMGDRVITTSTRTWALPTYNNHLYRQISSQSGASNDNHYFGYSTPWGYFDFNRFHCHFSPRDWQRLINNNWGSRPKRLNFKLFNIQVKEVTQNDGTTTIANNLTSTVQVFTDSEYQLPYVLGSAHQGCLPPFPADVFMVPQYGYLTLNNGSQAVGRSSFYCLEYFPSQMLRTGNNFTFSYTFEDVPFHSSYAHSQSLDRLMNPLVDQYLYYLSRTNTPSGTTTQSRLQFSQAGASDIRDQSRNWLPGPCYRQQRVSKTSADNNNSEYSWTGATKYHLNGRDSLVNPGPAMASHKDDEEKFFPQSGVLIFGKQDSGKTNVDIEKVMITDEEEIRTTNPVATEQYGSVSTNLQSGNTQAATSDVNTQGVLPGMVWQDRDVYLQGPIWAKIPHTDGHFHPSPLMGGFGLKHPPPQILIKNTPVPANPSTTFSAAKFASFITQYSTGQVSVEIEWELQKENSKRWNPEIQYTSNYNKSVNVDFTVDTNGVYSEPRPIGTRYLTRNL

SEQ ID NO: 43 - protein, 735 aa, Adeno-associated virus
MAADGYLPDWLEDTLSEGIRQWWKLKPGPPPPKPAERHKDDSRGLVLPGYKYLGPFNGLDKGEPVNEADAAALEHDKAYDRQLDSGDNPYLKYNHADAEFQERLKEDTSFGGNLGRAVFQAKKRILEPLGLVEEPVKTAPGKKRPVEHSPAEPDSSSGTGKAGQQPARKRLNFGQTGDADSVPDPQPLGQPPAAPSGLGTNTMASGSGAPMADNNEGADGVGNSSGNWHCDSTWMGDRVITTSTRTWALPTYNNHLYKQISSQSGASNDNHYFGYSTPWGYFDFNRFHCHFSPRDWQRLINNNWGFRPKRLSFKLFNIQVKEVTQNDGTTTIANNLTSTVQVFTDSGYQLPYVLGSAHQGCLPPFPADVFMVPQYGYLTLNNGSQAVGRSSFYCLEYFPSQMLRTGNNFTFSYTFEDVPFHSSYAHGQSLDRLMNPLIDQYLYYLSRTNTPSGTTTMSRLQFSQAGASDVRDQSRNWLPGPCYRQQRVSKTAADNNNSDYSWTGATKYHLNGRDSLVNPGPAMASHKDDEEKYFPQSGVLVFGKQDSGKTNVDIEKVMITDEEEIRTTNPAATEQYGSVSTNLQSGNTQAATSDVNTQGVLPGMVWQDRDVYLQGPIWAKIPHTDGHFHPSPLMGGFGLKHPPPQILIKNTPVPANPSTTFSAAKFVSFITQYSTGQVSVEIEWELQKENSKRWNPEIQYTSNYNKSVNVDFTVDTNGVYSEPRPIGTRYLTRNL

SEQ ID NO: 44 - protein, 735 aa, Adeno-associated virus; identical to SEQ ID NO: 41

SEQ ID NO: 45 - protein, 735 aa, Adeno-associated virus
MAADGYLPDWLEDTLSEGIRQWWKLKPGPPPPKPAERHKDDSRGLVLPGYKYLGPFNGLDKGEPVNEADAAALEHDKAYDRQLDSGDNPYLKYNHADAEFQERLKGDTSFGGNLGRAVFQAKKRILEPLGLVEEPVKTAPGKKRPVEHSPAEPDSSSGTGKAGQQPARKRLNFGQTGDADSVPDPQPLGQPPAAPSGLGTNTMASGSGAPMADNNEGADGVGNSSGNWHCDSTWMGGRVITTSTRTWALPTYNNHLYKQISSQSGASNDNHYFGYSTPWGYFDFNRFHCHFSPRDWQRLINNNWGFRPKRLSFKLFNIQVKEVTQNDGTTTIANNLTSTVQVFTDSEYQLPYVLGSAHQGCLPPFPADVFMVPQYGYLTLNNGSQAVGRSSFYCLEYFPSQTLRTGNNFTFSYTFEDVPFHSSYAHSQSLDRLMNPLIDQYLYYLSRTNTPSGTTTMSRLQFSQAGASDIRDQSRNWLPGPCYRQQRVSKTAADNNNSDYSWTGATKYHLNGRDSLVNPGPAMASHKDDEEKYFPQSGVLIFGKQDSGKTNVDIEKVMITDEEEIRTTNPVATEQYGSVSTNLQSGNTQAATSDVNTQGVLPGMVWQDRDVYLQGPIWAKIPHTDGHFHPSPLMGGFGLKHPPPQILIKNTPVPANPSTTFSAAKFASFITQYSTGQVSVEIEWELQKENSKRWNPEIQYTSNYNKSVNVDFTVDTNGVYSEPRPIGTRYLTRNL

SEQ ID NO: 46 - protein, 735 aa, Adeno-associated virus
MAADGYLPDWLEDTLSEGIRQWWKLKPGPPPPKPAERHKDDSRGLVLPGYKYLGPFNGLDKGEPVNEADAAALEHDKAYDRQLDSGDNPYLKYNHADAEFQERLKEDTSFGGNLGRAVFQAKKRILEPLGLVEEPVKTAPGKKRPVEHSPAEPDSSSGTGKAGQQPARKRLNFGQTGDADSVPDPQPLGQPPAAPSGLGTNTMASGSGAPMADNNEGADGVGNSSGNWHCDSTWMGDRVITTSTRTWALPTCNNHLYKQISSQSGASNDNHYFGYSTPWGYFDFNRFHCHFSPRDWQRLINNNWGFRPKRLSFKLFNIQVKEVTQNDGTTTIANNLTSTVQVFTDSEYQLPYVLGSAHQGCLPPFPADVFMVPQYGYLTLNNGSQAVGRSSFYCLEYFPSQMLRTGNNFTFSYTFEDVPFHSSYAHSQSLDRLMNPLIDQYLYYLSRTNTPSGTTTMSRLQFSQAGASDIRDQSRNWLPGPCYRQQRVSKTAADNNNSDYSWTGATKYHLNGRDSLVNPGPAMASHKDDEEKYFPQSGVLIFGKQDSGKTNVDIEKVMITDEEEIRTTNPVATEQYGSVSTYLQSGNTQAATSDVNTQGVLPGMVWQDRDVYLRGPIWAKIPHTDGHFHPSPLMGGFGLKHPPPQILIKNTPVPANPSTTFSAAKFASFITQYSTGQVSVEIEWELQKENSKRWNPEIQYTSNYNKSVNVDFTVDTNGVYSEPRPIGTRYLTRNL

SEQ ID NO: 47 - protein, 735 aa, Adeno-associated virus
MAADGYLPDWLEDTLSEGIRQWWKLKPGPPPPKPAERHKDDSRGLVLPGYKYLGPFNGLDKGEPVNEADAAALEHDKAYDRQLDSGDNPYLKYNHADAEFQERLKEDTSFGGNLGRAVFQAKKRVLEPLGLVEGPVKTAPGKKRPVEHSPAEPDSSSGTGKAGQQPARKRLNFGQTGDADSVPDPQPLGQPPAAPSGLGSTTMATGSGAPMADNNEGADGVGNSSGNWHCDSQWLGDRVITTSTRTWALPTYNNHLYKQISSQSGASNDNHYFGYSTPWGYFDFNRFHCHFSPRDWQRLINNNWGFRPKRLNFKLFNIQVKEVTQNDGTTTIANNLTSTVQVFTDSEYQLPYVLGSAHQGCLPPFPADVFMVPQYGYLTLNNGSQAVGRSSFYCLEYFPSQMLRTGNNFQFSYTFEDVPFHSSYAHSQSLDRLMNPLIDQYLYYLNKTQSNSGTLQQSRLLFSQAGPTSMSLQAKNWLPGPCYRQQRLSKQANDNNNSNFPWTAATKYHLNGRDSLVNPGPAMASHKDDEEKFFPMHGTLIFGKQGTNANDADLDNVMITDEEEIRTTNPVATEQYGYVSNNLQNSNTGPTTGTVNHQGALPGMVWQDRDVYLQGPIWAKIPHTDGHFHPSPLMGGFGLKHPPPQIMIKNTPVPANPPTNFSSAKFASFITQYSTGQVSVEIEWELQKENSKRWNPEIQYTSNYNKSVNVDFTVDTNGVYSEPRPIGTRYLTRNL

SEQ ID NO: 48 - protein, 735 aa, Adeno-associated virus
MAADGYLPDWLEDTLSEGIRQWWKLKPGPPPPKPAERHKDDSRGLVLPGYKYLGPFNGLDKGEPVNEADAAALEHDKAYDRQLDSGDNPYLKYNHADAEFQERLKEDTSFGGNLGRAVFQAKKRVLEPLGLVEEPVKTAPGKKRPVEHPPVEPDSSSGTGKAGQQPARKRLNFGQTGDADSVPDPQPLGQPPAAPSGLGSTTMATGSGAPMADNNEGADGVGNSSGNWHCDSQWLGDRVITTSTRTWALPTYNNHLYKQISSQSGASNDNHYFGYSTPWGYFDFNRFHCHFSPRDWQRLINNNWGFRPKRLNFKLFNIQVKEVTQNDGTTTIANNLTSTVQVFTDSEYQLPYVLGSAHQGCLPPFPADVFMVPQYGYLTLNNGSQAVGRSSFYCLEYFPSQMLRTGNNFQFSYTFEDVPFHSSYAHSQSLDRLMNPLIDQYLYYLNKTQTNSGTLQQSRLLFSQAGPTNMSLQAKNRLPGPCYRQQRLSKQANDNNNSNFPWTAATKYHLNGRDSLVNPGPAMASHKDDEEKFFPMHGTLIFGKQGTNANDADLENVMITDEEEIRTTNPVATEQYGTVSNNLQNSNTGPTTGTVNHQGALPGMVWQDRDVYLQGPIWAKIPHTDGHFHPSPLVGGFGLKHPPPQIMIKNTPVPANPPTNFSSAKFASFITQYSTGQVSVEIEWELQKENSKRWNPEIQYTSNYNKSVNVDFTVDTNGVYSEPRPIGTRYLTRNL

SEQ ID NO: 49 - protein, 735 aa, Adeno-associated virus
MAADGYLPDWLEDTLSEGIRQWWKLKPGPPPPKPAERHKDDSRGLVLPGYKYLGPFNGLDKGEPVNEADAAALEHDKAYDRQLDSGDNPYLKYNHADAEFQERLKEDTSFGGNLGRAVFQAKKRVLEPLGLVEEPVKTAPGKKRPVEHSPAEPDSSSGTGKAGQQPARKRLNFGQTGDADSVPDPQPLGQPPAAPSGLGSTTMATGSGAPMADNNEGADGVGNSSGNWHCDSQWLGDRVITTSTRTWAQPTYNNHLYKQISSQSGASNDNHYFGYSTPWGYFDFNRFHCHFSPRDWQRLINNNWGFRPKRLNFKLFNIQVKEVTQNDGTTTIANNLTSTVQVFTDSEYQLPYVLGSAHQGCLPPFPADVFMVPQYGYLTLNNGSQAVGRSSFYCLEYFPSQMLRTGNNFQFSYTFEDVPFHSSYAHSQSLDRLMNPLIDQYLYYLNKTQSNSGALQQSRLLFSQAGPTSMSLQAKNWLPGPCYRQQRLSKQANDNNNSNFPWTAATKYHLNGRDSLVNPGPAMASHKDDEEKFFPMHGTLIFGKQGTNANDADLDNVMITDEEEIRTTNPVATEQYGYVSNNLQNSNTGPTTGTVNHRGALPGMVWQDRDVYLQGPIWAKIPHTDGHFHPSPLMGGFGLKHPPPQIMIKNTPVPANPPTNFSSAKFASFITQYSTGQVSVEIEWELQKENSKRWNPEIQYTSNYNKSVNVDFTVDTNGVYSEPRPIGTRYLTRNL

SEQ ID NO: 50 - protein, 735 aa, Adeno-associated virus
MAADGYLPDWLEDTLSEGIRQWWKLKPGPPPPKPAERHQDNSRGLVLPGYKYLGPSNGLDKGEPVNEADAAALEHDKAYDRQLDSGDNPYLKYNHADAEFQERLKEDTSFGGNLGRAVFQAKKRVLEPLGLVEEPVKTAPGKKRPVEHSPVEPDSSSGTGKAGHQPARKRLNFGQTGDADSVPDPQPLGQPPAAPTSLGSTTMATGSGAPMADNNEGADGVGNSSGNWHCDSQWLGDRVITTSTRTWALPTYNNHLYKQISSQSGASNDNHYFGCSTPWGYFDFNRFHCHFSPRDWQRLINNNWGFRPKRLNFKLFNIQVKEVTQNDGTTTIANNLTSTVQVFTDSEYPLPYVLGSAHQGCLPPFPADVFMVPQYGYLTLNNGSQAVGRSSFYCLEYFPSQMLRTGNNFTFSYTFEDVPFHSSYAHSQSLDRLMNPLIDQYLYYLNRTQSNSGTLQQSRLLFSQAGPTSMSLQAKNWLPGPCYRQQRLSKQANDNNNSNFPWTAATKYHLNGRDSLVNPGPAMASHKDDEEKFFPMHGTLIFGKQGTNANDADLEHVMITDEEEIRTTNPVATEQYGNVSNNLQNSNTGPTTENVNHQGALPGMVWQDRDVYLQGPIWAKIPHTDGHFHPSPLMGGFGLKHPPPQIMIKNTPVPANPPTNFSSAKFASFITQYSTGQVSVEIEWELQKENSKRWNPEIQYTSNYNKSVNVDFTVDTNGVYSEPCPIGTRYLTRNL

SEQ ID NO: 51 - protein, 734 aa, Adeno-associated virus
MAADGYLPDWLEDTLSEGIRQWWKLKPGPPPPKPAERHKDDSRGLVLPGYKYLGPFNGLDKGEPVNEADAAALEHDKAYDRQLDSGDNPYLKYNHADAEFQERLKEDTSFGGNLGRAVFQAKKRVLEPLGLVEEPVKTAPGKKRPVEHSPAEPDSSSGTGKAGQQPARKRLNFGQTGDADSVPDPQPLGQPPAAPTSLGSTTMATGSGAPMADNNEGADGVGNSSGNWHCDSQWLGDRVITTSTRTWALPTYNNHLYKQISSQSGASNDNHYFGYSTPWGYFDFNRFHCRFSPRDWQRLINNNWGFRPKRLNFKLFNIQVKEVTQNDGTTTIANNLTSTVQVFTDSEYQLPYVLGSAHQGCLPPFPADVFMVPQYGYLTLNNGSQAVGRSSFYCLEYFPSQMLRTGNNFQFSYTFEDVPFHSSYAHSQGLDRLMNPLIDQYLYYLNRTQTASGTQQSRLLFSQAGPTSMSLQAKNWLPGPCYRQQRLSKQANDNNNSNFPWTGATKYHLNGGDSLVNPGPAMASHKDDEEKFFPMHGTLIFGKEGTNATNAELENVMITDEEEIRTTNPVATEQYGYVSNNLQNSNTAASTETVNHQGALPGMVWQDRDVYLRGPIWAKIPHADGHFHPSPLMGGFGLKHPPPQIMIKNTPVPANPPTNFSSAKFASFITQYSTGQVSVEIEWELQKENSKRWNPEIQYTSNYNKSVNVDFTVDTNGVYSEPRPIGTRYLTRNL

SEQ ID NO: 52 - protein, 734 aa, Adeno-associated virus
MAADGYLPDWLEDTLSEGIRQWWKLKPGPPPPKPAERHKDDSRGLVLPGYKYLGPFNGLDKGEPVNEADAAALEHDKAYDRQLDSGDNPYLKYNHADAEFQERLKEDTSFGGNLGRAVFQAKKRVLEPLGLVEEPVKTAPGKKRPVEHSPAEPDSSSGTGKAGQQPARKRLNFGQTGDADSVPDPQPLRQPPAAPTSLGSTTMATGSGAPMADNNEGADGVGNSSGNWHCDSQWLGDRVITTSTRTWALPTYNNHLYKQISSQSGASNDNHYFGYSTPWGYFDFNRFHCHFSPRDWQRLINNNWGFRPKRLNFKLFNIQVKEVTQNDGTTTIANNLTSTVQVFTDSEYQLPYVLGSAHQGCLPPFPADVFMVPQYGYLTLNNGSQAVGRSSFYCLEYFPSQMLRTGNNFQFSYTFEDVPFHSSYAHSQSLDRLMNPLIDQYLYYLNRTQTASGTQQSRLLFSQAGPTSMSLQAKNWLPGPCYRQQRLSKQANDNNNSNFPWTGATKYYLNGRDSLVNPGPAMASHKDDEEKFFPMHGTLIFGKEGTNATNAELENVMITDEEEIRTTNPVATEQYGYVSNNLQNSNTAASTETVNHQGALPGMVWQDRDVYLQGPIWAKIPHTDGHFHPSPLMGGFGLKHPPPQIMIKNTPVPANPPTNFSSAKFASFITQYSTGQVSVEIEWELQKENSKRWNPEIQYTSNYNKSVNVDFTVDTNGVYSEPRPIGTRYLTRNL

SEQ ID NO: 53 - protein, 735 aa, Adeno-associated virus
MAADGYLPDWLEDTLSEGIRQWWKLKPGPPPPKPAERHKDDSRGLVLPGYKYLGPFNGLDKGEPVNEADAAALEHDKAYDRQLDSGDNPYLKYNHADAEFQERLKEDTSFGGNLGRAVFQAKKRVLEPLGLVEEPVKTAPGKKRPVEHSPVEPDSSSGTGKAGQQPARKRLNFGQTGDADSVPDPQPLGQPPAAPSGLGSTTMATGSGAPMADNNEGADGVGNSSGNWHCDSQWLGDRVITTSTRTWALPTYNNHLYKQISSQSGASNDNHYFGYSTPWGYFDFNRFHCHFSPRDWQRLINNNWGFRPKRLNFKLFNIQVKEVTQNDGTTTIANNLTSTVQVFTDSEYQLPYVLGSAHQGCLPPFPADVFMVPQYGYLTLNNGSQAVGRSSFYCLEYFPSQMLRTGNNFQFSYTFEDVPFHSSYAHSQSLDRLMNPLVDQYLYYLNKTQTNSGTLQQSRLLFSQAGPTNMSLQAKNWLPGPCYRQQRLSKQANDNNNSNFPWTAATKYHLNGRDSLVNPGPAMASHKDDEEKFFPMHGTLIFGKQGTNANDADLENVMITDEEEIRTTNPVATEQYGTVSNNLQNSNTGPTTGTVNHQGALPGMVWQDRDVYLQGPIWAKIPHTDGHFHPSPLMGGFGLKHPPPQIMIKNTPVPANPPTNFSSAKFASFITQYSTGQVSVEIEWELQKENSKRWNPEIQYTSNYNKSVNVDFTVDTNGVYSEPRPIGTRYLTRNL

SEQ ID NO: 54 - protein, 734 aa, Adeno-associated virus
MAADGYLPDWLEDTLSEGIRQWWKLKPGPPPPKPAERHKDDSRGLVLPGYKYLGPFNGLDKGEPVNEADAAALEHDKAYDRQLDSGDNPYLKYNHADAEFQERLKEDTSFGGNLGRAVFQAKKRVLEPLGLVEEPVKTAPGKKRPVEHSPAEPDSSSGTGKAGQQPARKRLNFGQTGDADSVPDPQPLGQPPAAPTSLGSTTMATGSGAPMADNNEGADGVGNSSGNWHCDSQWLGDRVITTSTRTWALPTYNNHLYKQISSQSGASNDNHYFGYSTPWGYFDFNRFHCHFSPRDWQRLINNNWGFRPKRLNFKLFNIQVKEVTQNDGTTTIANNLTSTVQVFTDSEYQLPYVLGSAHQGCLPPFPADVFMVPQYGYLTLNNGSQAVGRSSFYCLECFPSQMLRTGNNFQFSYTFEDVPFHSSYAHSQSLDRLMNPLIDQYLYYLNRTQTASGTQQSRLLFSQAGPTSMSLQAKNWLPGPCYRQQRLSKQANDNNNSNFPWTGATKYHLNGRDSLVNPGPAMASHKDDEEKFFPMHGTLIFGKEGTNATNAELENVMITDEEEIRTTNPVATEQYGYVSNNLQNSNTAASTETVNHQGALPGMVWQDRDVYLQGPIWAKIPHTDGHFHPSPLMGGFGLKHPPPQIMIKNTPVPANPPTNFSSAKFASFITQYSTGQVSVEIEWELQKENSKRWNPEIQYTSNYNKSVNVDFTVDTNGVYSEPRPIGTRYLTRNL

SEQ ID NO: 55 - protein, 735 aa, Adeno-associated virus
MAADGYPPDWLEDTLSEGIRQWWKLKPGPPPPKPAERHKDDSRGLVLPGYKYLGPFNGLDKGEPVNEADAAALEHDKAYDRQLDSGDNPYLKYNHADAEFQERLKEDTSFGGNLGRAVFQAKKRVLEPLGLVEEPVKTAPGKKRPVEHSPVEPDSSSGTGKAGQRPARKRLNFGQTGDADSVPDPQPLGQPPAAPSGLGSTTMATGSGAPMADNNEGADGVGNSSGNWHCDSQWLGDRVITTSTRTWALPTYNNHLYKQISSQSGASNDNHYFGYSTPWGYFDFNRFHCHFSPRDWQRLINNNWGFRPKRLNFKLFNIQVKEVTQNDGTTTIANNLTSTVQVFTDSEYQLPYVLGSAHQGCLPPFPADVFMVPQYGYLTLNNGSQAVGRSSFYCLEYFPSQMLRTGNNFQFSYTFEDVPFHSSYAHSQSLDRLMNPLIDQYLYYLNKTQTNSGTLQQSRLLFSQAGPTNMSLQAKNWLPGPCYRQQRLSKQANDNNNSNFPWTAATKYHLNGRDSLVNPGPAMASHKDDEEKFFPMHGTLIFGKQGTNANDADLENVMITDEEEIRATNPVATEQYGTVSNNLQNSNTGPTTGTVNRQGALPGMVWQDRDVYLQGPIWAKIPHTDGHFHPSPLMGGFGLKHPPPQIMIKNTPVPANPPTNFSSAKFASFITQYSTGQVSVEIEWELQKENSKRWNPEIQYTSNYNKSVNVDFTVDTNGVYSEPRPIGTRYLTRNL

SEQ ID NO: 56 - protein, 735 aa, Adeno-associated virus
MAADGYLPDWLEDTLSEGIRQWWKLKPGPPPPKPAERHKDDSRGLVLPGYKYLGPFNGLDKGEPVNEADAAALEHDKAYDRQLDSGDNPYLKYNHADAEFQERLKEDTSFGGNLGRAVFQAKKRVLEPLGLVEEPVKTAPGKKRPVEHSPVEPDSSSGTGKAGQQPARKRLNFGQTGDADSVPDPQPLGQPPAAPSGLGSTTMATGSGAPMADNNEGADGVGNSSGNWHCDSQWLGDRVITTSTRTWALPTYNNHLYKQISSQSGASNDNHYFGYSTPWGYFDFNRFHCHFSPRDWQRLINNNWGFRPKRLNFKLFNIQVKEVTQNGGTTTIANNLTSTVQVFTDSEYQLPYVLGSAHQGCLPPFPADVFMVPQYGYLTLNNGSQAVGRSSFYCLEYFPSQMLRTGNNFQFSYTFEDVPFHSSYAHSQSLDRLMNPLIDQYLYYLNKTQTNSGTLQQSRLLFSQAGPTNMSLQAKNWLPGPCYRQQRLSKQANGNNNSNFPWTAATKYHLNGRDSLVNPGPAMASHKDDEEKFFPMHGTLIFGKQGTNANDADLENVMITDEEEIRATNPVATEQYGTVSNNLQNSNTGPTTGTVNHQGALPGMVWQDRDVYLQGPIWAKIPHTDGHFHPSPLTGGFGLKHPPPQIMIKNTPVPANPPTNFSSAKFASFITQYSTGQVSVEIEWELQKENSKRWNPEIQYTSNYNKSVNVDFTVDTNGVYSEPRPIGTRYLTRNL

SEQ ID NO: 57 - protein, 735 aa, Adeno-associated virus
MAADGYLPDWLEDTLSEGIRQWWKLKPGPPPPKPAERHKDDSRGLVLPGYKYLGPFNGLDKGEPVNEADAAALEHDKAYDRQLESGDNPYLKYNHADAEFQERLKEDTSFGGNLGRAVFQAKKRVLEPLGLVEEPVKTAPGKKRPVEHSPVEPDSSSGTGKAGQQPARKRLNFGQTGDADSVPDPQPLGQPPAAPSGLGSTTMASGSGAPVADNNEGADGVGNSSGNWHCDSQWLGDRVITTSTRTWALPTYNNHLYKQISSQSGASNDNHYFGYSTPWGYFDFNRFHCHFSPRDWQRLINNSWGFRPKRLNFKLFNIQVKEVTQNDGTTTIANNLTSTVQVFTDSEYQLPYVLGSAHQGCLPPFPADVFMVPQYGYLTLNNGSQAVGRSSFYCLEYFPSQMLRTGNNFQFSYTFEDVPFHSSYAHSQSLDRLLNPLIDQYLYYLNKTQSNSGTLQQSRLLFSQAGPTSMSLQAKNWLPGPCYRQQRLSKQANDNNNSNFPWTAATKYHLNGRDSLVNPGPAMASHKDDEEKFFPMHGTLIFGKQGTNANDADLDNVMITDEEEIRTTNPVATEQYGYVSNNLQNSNTGPTTGTVNHQGALPGMVWQDRDVYLQGPIWAKIPHTDGHFHPSPLMGGFGLKHPPPQIMIKNTPVPANPPTNFSSSKFASFITQYSTGQVSVEIEWELQKENSKRWNPEIQYTSNYNKSVNVDFTVDTNGVYSEPRPIGTRYPTRNL

SEQ ID NO: 58 - protein, 736 aa, Adeno-associated virus
MAADGYLPDWLEDTLSEGIRQWWKLKPGPPPPKPAERHKDDSRGLVLPGYKYLGPFNGLDKGEPVNEADAAALEHDKAYDRQLDSGDNPYLKYNHADAEFQERLKEDTSFGGNLGRAVFQAKKRVLEPLRPGLRKPVKTAPGKKRPVEHSPVEPDSSSGTGKAGQQPARKRLNFGQTGDADSVPDPQPLGQPPAAPSGLGSTTMATGSGAPMADNNEGADGVGNSSGNWHCDSQWLDDRVIATSTRTWALPTYNNHLYKQISSQSGACNDNHYFGYSTPWGYFDFNRFHCHFSPRDWQRLINSNWGFRPKRLNFKLFNIQVKEVTQNDGTTTIANNLTSTVQVFTDSEYQLPYVPGSAHQGCLPPFPADVFMVPQYGYLTLNNGSQAVGRSSFYCLEYFPSQMLRTGNNFQFSYTFEDVPFHSSYAHCQSLDRLMNPLIDQYLYYLNKTQTNSGTLQQSRLLFSQAGPTNMSLQAKNWLPGPCYRQQRLSKQANDNNNCNFPWTAATKYHLNGRDSLVNPGPAMASHKDDEEKFFPMHGTLIFGKQGTNANDADLENVMITDEEEIRPTNPVATEQYGTVSNNLQNSNTGPTTGTVNHQGALPGMVWQDRDVYLQGPIWAKIPHTDGHFHPSPLMGGFGLKHPPPQIMIKSTPVPANPPTNFSSAKFASSITQYSTGQVSVEIEWELQKENSKRWNPEIQYTSNYNKSVNVDFTVDTNGVYSEPRPIGTRYLTRNL

SEQ ID NO: 59 - protein, 735 aa, Adeno-associated virus
MAADGYLPDWLEDTLSEGIRQWWKLKPGPPPPKPAERHKDGSRGLVLPGYKYLGPFNGLDKGEPVNEADAAALEHDKAYDRQLNSGDNPYLKYNHADAEFQERLKEDTSFGGNLGRAVFQAKKRVLEPLGLVEEPVKTAPGKKRPVEHSPAEPDSSSGTGKAGQQPARKRLNFGQTGDADSVPDPQPLGQPPAAPSGLGSTTMATGSGAPMADNNEGADGVGNSSGNWHCDSQWLGDRVITTSTRTWALPTYNNHLYKQISSQSGASNDNHYFGYSTPWGYFDFNRFHCHFSPRDWQRLINNNWGFRPKRLNFKLFNIQVKEVTQNDGTTTIANNLTSTVQVFTDSEYQLPYVLGSAHQGCLPPFPADVFMVPQYGYLTLNNGSQAVGRSPFYCLEYFPSQMLRTGNNFQFSYTFEDVPFHSSYAHSQSLDRLMNPLIDQYLYYLNKTQTNSGTLQQSRLLFSQAGPTNMSLQAKNWLPGPCYRQQRLSKQANDNNNSNFPWTAATKYHLNGRDSLVNPGPAMASHKDDEEKFFPMHGTLIFGKQGTNANDADLENVMITDEEEIRTTNPVATEQYGTVSNNLQNSNTGPTTGTVNHQGALPGMVWQDRDVYLQGPIWAKIPHTDGHFHPSPLMGGFGLKHPPPQIMIKNTPVPANPPTNFSSAKFASFITQYSTGQVSVEIEWELQKENSKRWNPEIQYTSNYNKSVNVDFTVDNNGVYSEPRPIGTRYLTRNL

SEQ ID NO: 60 - protein, 735 aa, Adeno-associated virus
MAADGYLPDWLEDTLSEGIRQWWKLKPGPPPPKPAERHKDDSRGLVLPGYKYLGPFNGLYKGEPVDEADAAALEHDKAYDRQLDSGDNPYLKYNHADAEFQERLKEDTSFGGNLGRAVFQAKKRVLEPLGLVGEPVKTAPGKKRPVEHSPVEPDSSSGTGKAGNQPARKRLNFGQTGDADSVPDPQPLGQPPAAPSGLGSTTMATGSGAPVADNNEGADGVGNSSGNWHCDSQWLGDRVITTSTRTWALPTYNNHLYKQISSQSGASNDNHYFGYSTPWGYFDFNRFHCHFSPRDRQRLINNNWGFRPKRLNFKLFNIQVKEVTQNDGTTTIANNLTSTVQVFTDSGYQLPYVLGLAHQGCLPPFPADVFMVPQYGYLTLNNGSQAVGRSSFYCLEYFPSQMLRTGNNFQFSYTFEDVPFHSSYAHSQSLDRLMNPLIDQYLYYLNKTQSNSGTLQQSRLLFSQAGPTSMSLQAKNWLPGPCYRQQRLSKQANDNNNSNFPWTAATKYHLNGRDSLVNPGPAMASHKDDEEKFFPMHGTLIFGKQGTNANDADLDNVMITDEEEIRTTNPVATEQYGYVSNNLQNSNTGPTTGTVNHQGALPGMVWQDRDVYLQGPIWAKIPHTDGHFHPSPLMGGFGLKHPPPQIMIKNTPVPANPPTNFSSAKFASFITQYSTGQVSVEIEWELQKEDSKRWNPEIQYTSNYNKPVNVDFTVDTNGVYSEPRPIGTRYLTRNL

SEQ ID NO: 61 - protein, 735 aa, Adeno-associated virus
MAADGYLPDWLEDTLSEGIRQWWKLKPGPPPPKPAERHKDDSRGLVLPGYKYLGPFNGLYKGEPVNEADAAALEHDKAYDRQLDSGDNPYLKYNHAGAEFQERLKEDTSFGGNLGRAVFQAKKRVLEPLGLVEEPVKTAPGKKRPVEHSPVEPDSSSGTGKAGNQPARKRLNFGQTGDADSVPDPQPLGQPPAAPSGLGSTTMATGSGAPVADNNEGADGVGNSSGNWHCDSQWLGDRVITTSTRTWALPTYNNHLYKQISSQSGASNDNHYFGYSTPWGYFDFNRFHCHFSPRDWQRLINNNWGFRPKRLNFKLFNIQVKEVTQNDGTTTIANNLTSTVQVFTDSEYQLPYVLGSAHQGCLPPFPADVFMVPQYGYLTLNNGSQAVGRSSFYCLEYFPSQMLRTGNNFQFSYTFEDVPFHSSYAHSQSLDRLMNPLIDQYLYYLNKTQSNSGTLQQSRLLFSQAGPTSMSLQAKNWLPGPCYRQQRLSKQANDNNNSNFPWTAATKYHLNGRDSLVNPGPAMASHKDDEEKFFPMHGTLIFGKQGTNANDADLDNVMITDEEEIRTTNPVATEQYGYVSNNLQDSNTGPTTGTVNHQGALPGMVWQDRDVYLQGPIWAKIPHTDGHFHPSPLMGGFGLKHPPPQIMIKNTPVPANPPTNFSSAKFASFITQYSTGQVSVEIEWELQKENSKRWNPEIQYTSNYNKSVNVDFTVDTNGVYSEPRPIGTRYLTRNL

SEQ ID NO: 62 - protein, 735 aa, Adeno-associated virus
MAADGYLPDWLEDTLSEGIRQWWKLKPGPPPPKPAERHQDDSRGLVLPGYKYLGPFNGLDKGEPVNEADAAALEHDKAYDRQLDSGDNPYLKYNHADAEFQERLKEDTSFGGNLGRAVFQAKKRVLEPLGLVEEPVKTAPGKKRPVEHSPVEPDSSSGTGKAGHQPARKRLNFGQTGDADSVPDPQPLGQPPAAPTSLGSTTMATGSGAPMADNNEGADGVGNSSGNWHCDSQWLGDRVITTSTRTWALPTYNNHLYKQISSQSGASNDNHYFGYSTPWGYFDFNRFHCHFSPRDWQRLINNNWGFRPKRLNFKLFNIQVKEVTQNDGTTTIANNLTSTVQVFTDSEYQLPYVLGSAHQGCLPPFPADVFMVPQYGYLTLNNGSQAVGRSSFYCLEYFPSQMLRTGNNFTFSYTFEDVPFHSSYAHSQSLDRLMNPLIDQYLYYLNRTQSNSGTLQQSRLLFSQAGPTSMSLQAKNWLPGPCYRQQRLSKQANDNNNSNFPWTAATKYRLNGRDSLVNPGPAMASHKDDEEKFFPMHGTLIFGKQGTNANDADLEHVMITDEEEIRTTNPVATEQYGNVSNNLQNSNTGPTTENVNHQGALPGMVWQDRDVYLQGPIWAKIPHTDGHFHPSPLMGGFGLKHPPPQIMIKNTPVPANPPTNFSSAKFASFITQYSTGQVSVEIEWELQKENSKRWNPEIQYTSNYNKSVNVDFTVDTNGVYSEPRPIGTRYLTRNL

SEQ ID NO: 63 - protein, 735 aa, Adeno-associated virus
MAADGYLPDWLEDTLSEGIRQWWKLKPGPPPPKLAERHQDDSRGLVLPGYKYLGPFNGLDKGEPVNEADAAALEHDKAYDRQLDSGDNPYLKYNHADAEFQERLKEDTSFGGNLGRAVFQAKKRVLEPLGLVEEPVKTAPGKKRPVEHSPVEPDSSSGTGKAGHQPARKRLNFGQTGDADSVPDPQPLGQPPAAPTSLGSTTMATGSGAPMADNNEGADGVGNSSGNWHCDSQWLGDRVITTSTRTWALPTYNNHLYKQISSQSGASNDNHYFGYSTPWGYFDFNRFHCHFSPRDWQRLINNNWGFRPKRLNFKLFNIQVKEVTQNDGTTTIANNLTSTVQVFTDSEYQLPYVLGSAHQGCLPPFPADVFTVPQYGYLTLNNGSQAVGRSSFYCLEYFPSQMLRTGNNLTFSYTFEDVPFHSSYAHSQSLDRLMNPLIDQYLYYLNRTQSNSGTLQQSRLLFSQAGPTSMSLQAKNWLPGPCYRQQRLSKQANDNNNSNFPWTAATKYHLNGRDSLVNPGPAMASHKDDEEKFFPMHGTLIFGKQGTNANDADLEHVMITDEEEIRTTNPVATEQYGNVSNNLQNSNTGPTTENVNHQGALPGMVWQDRDVYLQGPIWAKIPHTDGHFHPSPLMGGFGLKHPPPQIMIKNTPVPANPPTNYSSAKFASFITQYSTGQVSVEIEWELRKENSKRWNPEIQYTSNYNKSVNVDFTVDTNGVYSEPRPIGTRYLTRNL

SEQ ID NO: 64 - protein, 735 aa, Adeno-associated virus
MAADGYLPDWLEDTLSEGIRQWWKLKPGPPPPKPAERHKDDSRGLVLPGYKYLGPFNGLDKGEPVNEADAAALEHDKAYDRQLDSGDNPYLKYNHADAEFQERLKEDTSFGGNLGRAVFQAKKRVLEPLGLVEEPVKTAPGKKRPVEHSPVEPDSSSGTGKAGQQPARKRLNFGQTGDADSVPDPQPLGQPPAAPSGLGSTTMATGSGAPMADNNEGADGVGNSSGNWHCDSQWLGDRVITTSTRTWALPTYNNHLYKQISSQSGASNDNHYFGYSTPWGYFDFNRFHCHFSPRDWQRLVNNNRGFRPKRLNFKLFNIQVKEVTQNDGTTTIANNLTSTVQVFTDSEYQLPYVLGSAHQGCLPPFPADVFMVPQYGYLTLNNGSQAVGRSSFYCLEYFPSQMLRTGNNFQFSYTFEDVPFHSSYAHSQSLDRLMNPLIDQYLYYLNKTQTNSGTLQQSRLLFSQAGPTNMSLQAKNWLPGPCYRQQRLSKQANDNNNSNFPWTAATKYHLNGRDSLVNPGPAMASHKDDEEKFFPMHGTLIFGKQGTNANDADLENVMITDEEEIRATNPVATEQYGTVSNNLQNSNTGPTTGTVNHQGALPGMVWQDRDVYLQGPIWAKIPHTDGHFHPSPLMGGFGLKHPPPQIMIKNTPVPANPPTNFSSAKFASFITQYSTGQVSVEIEWELQKENSKRWNPEIQYTSNYNKSVNVDFTVDTNGVYSEPRPIGTRYLTRNL

SEQ ID NO: 65 - protein, 737 aa, Adeno-associated virus
MAADGYLPDWLEDNLSEGIREWWDLKPGAPKPKANQQKQDDGRGLVLPGYKYLGPFNGLDKGEPVNAADAAALEHDKAYDQQLKAGDNPYLRYNHADAEFQERLQEDTSFGGNLGRAVFQAKKRVLEPLGLVEEAAKTAPGKKRPVEPSPQRSPDSSTGIGKKGQQPARKRLNFGQTGDSESVPDPQPLGEPPAGPSGLGSGTMAAGGGAPMADNNEGADGVGNASGNWHCDSTWLGDRVITTSTRTWALPTYNNHLYKQISSQSAGSTNDNVYFGYSTPWGYFDFNRFHCHFSPRDWQRLINNNWGFRPKKLNFKLFNIQVKEVTTNDGVTTIANNLTSTVQVFSDSEYQLPYVLGSAHQGCLPPFPADVFMIPQYGYLTLNNGSQSVGRSSFYCLEYFPSQVLRTGNNFTFSYTFEDVPFHSSYAHSQSLDRLMNPLIDQYLYYLARTQSNPGGTSGNRELQFYQGGPSTMAEQAKNWLPGPCFRQQRVSKTLDQNNNSNFAWTGATKYHLNGRNSLVNPGVAMATHKDDEDRFFPSSGVLIFGKTGATNKTTLENVLMTNEEEIRPTNPVATEEYGIVSSNLQAANTAAQTQVVNNQGALPGMVWQNRDVYLQGPIWAKIPHTDGNFHPSPLMGGFGLKHPPPQILIKNTPVPANPPEVFTPAKFASFITQYSTGQVSVEIEWELQKENSKRWNPEIQYTSNFDKQTGVDFAVDSQGVYSEPRPIGTRYLTRNL

SEQ ID NO: 66 - protein, 737 aa, Adeno-associated virus
MAADGYLPDWLEDNLSEGIREWWDLKPGAPKPKANQQKQDDGRGLVLPGYKYLGPFNGLDKGEPVNAADAAALEHDKAYDQQLKAGDNPYLRYNHADAEFQERLQEDTSFGGNLGRAVFQAKKRVLEPLGLVEEAAKTAPGKKRPVEPSPQRSPDSSTGIGKKGQQPARKRLNFGQTGDSESVPDPQPIGEPPAGPSGLGSGTMAAGGGAPMADNNKGADGVGNASGNWHCDSTWLGDRVITTSTRTWALPTYNNHLYKQISSQSAGSTNDNVYFGYSTPWGYFDFNRFHCHFSPRDWQRLINSNWGFRPKKLNFKLFNIQVKEVTTNDGVTTIANNLTSTVQVFSDSEYQLPYVLGSAHQGCLPPFPADVFMIPQYGYLTLNNGSQSVGRSSFYCLEYFPSQMLRTGNNFTFSYTFEDVPFHSSYAHSQSLDRLMNPLIDQYLYYLARTQSNAGGTAGNRELQFYQGGPTTMAEQAKNWLPGPCFRQQRVSKTLDQNNNSNFAWTGATKYHLNGRNSLVNPGVAMATHKDDEERFFPSSGVLIFGKTGAANKTTLENVLMTNEEEIRPTNPVATEEYGTVSSNLQAANTAAQTQVVNNQGALPGMVWQNRDVYLQGPIWAKIPHTDGNFHPSPLMGGFGLKHPPPQILIKNTPVPANPPEVFTPAKFASFITQYSTGQVSVEIEWELQKENSKRWNPEIQYTSNFDKQTGVDFAVDSQGVYSEPRPIGTRYLTRNL

SEQ ID NO: 67 - protein, 737 aa, Adeno-associated virus
MAADGYLPDWLEDNLSEGIREWWDLKPGAPKPKANQQKQDDGRGLVLPGYKYLGPFNGLDKGEPVNAADAAALEHDKAYDQQLKAGDNPYLRYNHADAEFQERLQEDTSFGGNLGRAVFQAKKRVLEPLGLVEEGAKTAPGKKRPVEPSPQRSPDSSTGIGKKGQQPARKRLNFGQTGDSESVPDPQPIGEPPAAPSSVGSGTMAAGGGAPMADNNEGADGVGSSSGNWHCDSTRLGDRVITTSTRTWALPTYNNHLYKQISSQSAGSTNDNVYFGYSTPWGYFDFNRFHCHFSPRDWQRLINNNWGFRPKKLNFKLFNIQVKEVTTNDGVTTIANNLTSTVQVFSDSEYQLPYVLGSAHQGCLPPFPADVFMIPQYGYLTLNNGSQSVGRSSFYCLEYFPSQMLRTGNNFTFSYTFEDVPFHSSYAHSQSLDRLMNPLIDQYLYYLARTQSNAGGTAGNRELQFYQGGPTTMAEQAKNWLPGPCFRQRRVSKTLDQNNNSNFAWTGATKYHLNGRNSLVNPGVAMATHKDDEERFFPSSGVLIFGKTGAANKTTLENVLMTNEEEIRPTNPVATEEYGTVSSNLQAANTAAQTQVVNNQGALPGMVWQNRDVYLQGPIWAKIPHTDGNFHPSPLMGGFGLKHPPPQILIKNTPVPANPPEVFTPAKFASFITQYSTGQVSVEIEWELQKENSKRWNPEIQYTSNFDKQTGVDFAVDSQGVYSEPRPIGTRYLTRNL

SEQ ID NO: 68 - protein, 737 aa, Adeno-associated virus
MAADGYLPDWLEDNLSEGIREWWDLKPGAPKPKANQQKQDDGRGLVLPGYKYLGPFNGLDKGEPVNAADAAALEHDKAYDQQLKAGDNPYLRYNHADAEFQERLQEDTSFGGNLGRAVFQAKKRVLEPLGLAEEAAKTAPGKKRPVEPSPQRSPDSSTGIGKKGQQPARKRLNFGQTGDSESVPDPQPIGEPPAGPSGLGSGTMAAGGGAPMADNNKGADGVGNASGNWHCDSTWLGDRVITTSTRTWALPTYNNHLYKQISSQSAGSTNDNVYFGYSTPWGYFDFNRFHCHFSPRDWQRLINNNWGFRPKKLNFKLFNIQVKEVTTGDGVTTIANNLTSTVQVFSDSEYQLPYVLGSAHQGCLPPFPADVFMIPQYGYLTLNNDSQSVGRSSFYCLEYFPSQMLRTGNNFTFSYTFEDVPFHSSYAHSQSLDRLMNPLIDQYLYYLARTQSNAGGTAGNRELQFYQGGPTTMAEQAKNWLPGPCFRQQRVSKTLDQNNNSNFAWTGATKYHLNGRNSLVNPGVAMATHKDDEERFFPSSGVLIFGKTGAANKTTLENVLMTNEEEIRPTNPVATEEYGTVSSNLQAANTAAQTQVVNNQGALPGMVWQNRDVYLQGPIWAKIPHTDGNFHPSPLMGGFGLKHPPPQILIKNTPVPANPPEVFTPAKFASFITQYSTGQVSVEIEWELQKENSKRWNPEIQYTSNFDKQTGVDFAVDSQGVYSEPRPIGTRYLTRNL

SEQ ID NO: 69 - protein, 737 aa, Adeno-associated virus; identical to SEQ ID NO: 8

SEQ ID NO: 70 - protein, 738 aa, Adeno-associated virus
MAADGYLPDWLEDNLSEGIREWWDLKPGAPKPKANQQKQDDGRGLVLPGYKYLGPFNGLDKGEPVNAADAAALEHDKAYDQQLKAGDNPYLRYNHADAEFQERLQEDTSFGGNLGRAVFQAKKRVLEPLGLVEEGAKTAPGKKRPVEPSPQRSPDSSTGIGKKGQQPARKRLNFGQTGDSESVPDPQPIGEPPAAPSSVGSGTMAAGGGAPMADNNEGADGVGSSSGNWHCDSTWLGDRVITTSTRTWALPTYNNHLYKQISNGTSGGSTNDNTYFGYSTPWGYFDFNRFHCHFSPRDWQRLINNNWGFRPKRLSFKLFNIQVKEVTQNEGTKTIANSLTSTIQVFTDSEYQLPYVLGSAHQGCLPPFPADVFMIPQYGYLTPNNGSQAVGRSSFYCLEYFPSQMLRTGNNFSFSYTFEDVPFHSSYAHSQSLDRLMNPLIDQYLYYLSRTQSTGGTAGTQQLLSSQAGPSNMSAQARNWLPGPCYRQQRVSTTLSQNNNSNFAWTGATKYHLNGRDSLVNPGVAMATNKDDEDRFFPSSGILMFGKQGAGKDNVDYSNVMLTSEEEIKTTNPVATEQYGVVADNLQQQNTAPIVGAVNSQGALPGMVWQNRDVYLQGPIWAKIPHTDGNFHPSPLMGGFGLKHPPPQILIKNTPVPADPPTAFNQAKLNSFITQYSTGQVSVEIEWELQKENSKRWNPEIQYTSNYYKSTNVDFAVNTEGVYSEPRPIGTRYLTRNL

SEQ ID NO: 71 - protein, 738 aa, Adeno-associated virus
MVADGYLPDWLEDNLSEGIREWWDLKPGAPKPKANQQKQGDGRGLVLPGYKYLGPFNGLDKGEPVNAADAAALEHDKAYDQQLKAGDNPYLRYNHADAELQERLQEDTSFGGNLGRAVFQAKKRVLEPLGLVEEGAKTAPGKKRPVEPSPQRSPDSSTGIGKKGQQPARKRLNFGQTGDSESVPDPQPIGEPPAAPSSVGSGTMAAGGGAPMADNNEGADGVGSSSGNWHCDSTWLGDRVITTSTRTWALPTYNNHLYKQISNGTSGGSTNDNTYFGYSTPWGYFDFNRFHCHFSPRDWQRLINNNWGFRPKRLSFKLFNIQVKEVTQNEGTKTIANNLTSTIQVFTDSEYQLPYVLGSAHQGCQPPFPADVFMIPQYGYLTLNNGSQAVGRSSFYCLEYFPSQMLRTGNNFSFSYTFEDVPFHSSYAHSQSLDRLMNPLIDQYLYYLSRTQSTGGTAGTQQLLFSQAGPSNMSAQARNWLPGPCYRQQRVSTTLSQNNNSNFAWTGATKYHLNGRDSLVNPGVAMATNKDDEDRFFPSSGILMFGKQGAGKDNVDYSNVMLTSEEEIKTTNPVATEQYGVVADNLQQQNTAPIVGAVNSQGALPGMVWQNRDVYLQGPIWAKIPHTDGNFHPSPLMGGFGLKHPPPQILIKNTPVPADPPTAFNQAKLNSFITQYSTGQVSVEIEWEPQKENSKRWNPEIQYTSNYYKSTNVDFAVNTEGVYSEPRPIGTRYLTRNL

SEQ ID NO: 72 - protein, 738 aa, Adeno-associated virus
MAADGYLPDWLEDNLSEGIREWWDLKPGAPKPKANQQKQDDGRGLVLPGYKYLGPFNGLDKGEPVNAADAAALEHDKAYDQQLKAGDNPYLRYNHADAEFQERLQEDTSFGGNLGRAVFQAKKRVLEPLGLVEEGAKTAPGKKRPVEPSPQRSPDSSTGIGKKGQQPARKRLNFGRTGDSESVPDPQPIGEPPAAPSSVGSGTMAAGGGAPMADNNEGADGVGSSSGNWHCDSTWLGDRVITTSTRTWALPTYNNHLYKQISNGTSGGSTNDNTYFGYSTPWGYLDFNRFHCHFSPRDWQRLINNNWGFRPKRLSFKLFNIQVKEVTQNEGTKTIANNLASTIQVFTDSEYQPPYVLGSAHQGCLPPFPADVFMIPQYGYLTLNNGSQAVGRSSFYCLEYFPSQMLRTGNNFSFSYTFEDVPFHSSYAHSQSLDRLMNPLIDQYLYYLSRTQSTGGTAGTQQLLFSRAGPSNMSAQARNWLPGPCYRQQRVSTTLSQNNNSNFAWTGATKYHLNGRDSLVNPGVAMATNKDDEDRFFPSSGILMFGKQGAGKDNVDYSNVMLTSEEEIKTTNPVATEQYGVVADNLQQQNTAPTVGAVNSQGALPGMVWQNRDVYLQGPIWAKIPHTDGNFHPSPLMGGFGLKHPPPQILIKNTPVPADPPTAFNQAKLNSFIAQYSTGQVSVEIEWELQKENSKRWNPEIQYTSNYYKSTNADFAVNTEGVYSEPRPIGTRYLTRNL

SEQ ID NO: 73 - protein, 738 aa, Adeno-associated virus
MAADGYLPDWLEDNLSEGIREWWDLKPGAPKPKANQQKQDDGRGLVLPGYKYLGPFNGLDKGEPVNAADAAALEHDKAYDQQLKAGDNPYLRYNHADAEFQERLQEDTSFGGNLGRAVFQAKKRVLEPLGLVEEGAKTAPGKKRPVEPSPQRSPDSSTGIGKKGQQPARKRLNFGQTGDSESVPDPQPIGEPPAAPSSVGSGTMAAGGGAPMADNNEGADGVGSSSGNWHCDSTWLGDRVITTSTRTWALPTYNNHLYKQISNGTSGGSTNDNTYFGYSTPWGYFDFNRFHCHFSPRDWQRLINNNWGFRPKRLSFKLFNIQVKEVTQNEGTKTIANNLTSTIQVFTDSEYQLPYVLGSAHQGCLPPFPADVFMIPQYGYLTLNNGSQAVGRSSFYCLEYFPSQMLRTGNNFSFSYTFEDVPFHSSYVHSQSLDRLMNPLIDQYLYYLSRTQSTGGTAGTQQLLFSQAGPSNMSAQARNWLPGPCYRQQRVSTTLSQNNNSNFAWTGATKYHLNGRDSLVNSGVAMATNKDDEDRFFPSSGILMFGKQGAGKDNVDYSNVMLTSEEEIKTTNPVATEQYGVVADNLQQQNTAPIVGAVNSQGALPGMVWQNRDVYLQGPIWAKIPHTDGNFHPSPLMGGFGLKHPPPQILIKNTPVPADPPTAFNQAKLNSFITQYSTGQVSVEIEWELQKENSKRWNPEIQYTSNYYKSTNVDFAVNTEGVYSEPRPIGTRYPTRNL

SEQ ID NO: 74 - protein, 738 aa, Adeno-associated virus; identical to SEQ ID NO: 10

SEQ ID NO: 75 - protein, 736 aa, Adeno-associated virus
MAADGYLPDWLEDNLSEGIREWWDLKPGAPKPKANQQKQDDGRGLVLPGYKYLGPFNGLDKGEPVNAADAAALEHDKAYDQQLEAGDNPYLRYNHADAEFQERLQEDTSFGGNLGRAVFQAKKRVLEPLGLVEEGAKTAPGKKRPVEQSPQEPDSSSGIGKKGQQPARKRLNFGQTGDSESVPDPQPLGEPPAAPSGVGPNTMAAGGGAPMADNNEGADGVGSSSGNWHCDSTWLGDRVITTSTRTWALPTYNNHLYKQISNGTSGGATNDNTYFGYSTPWGYFDFNRFHCHFSPRDWQRLINNNWGFRPKRLSFKLFNIQVKEVTQNEGTKTIANNLTSTIQVFTDSEYQLPYVLGSAHQGCLPPFPADVFMIPQYGYLTLNNGSQAVGRSSFYCLEYFPSQMLRTGNNFQFTYTFEDVPFHSSYAHSQSLDRLMNPLIDQYLYYLSRTQTTGGTANTQTLGFSQGGPNTMANQAKNWLPGPCYRQQRVSTTTGQNNNSNFAWTAGTKYHLNGRNSLANPGIAMATHKDDEERFFPVTGSCFWQQNAARDNADYSDVMLTSEEEIKTTNPVATEEYGIVADNLQQQNTAPQIGTVNSQGALPGMVWQNRDVYLQGPIWAKIPHTDGNFHPSPLMGGFGLKHPPPQILIKNTPVPADPPTTFNQSKLNSFITQYSTGQVSVEIEWELQKENSKRWNPEIQYTSNYYKSTSVDFAVNTEGVYSEPRPIGTRYLTRNL

SEQ ID NO: 76 - protein, 738 aa, Adeno-associated virus
MAADGYLPDWLEDNLSEGIREWWDLKPGAPKPKANQQKQDDGRGLVLPGYKYLGPFNGLDKGEPVNAADAAALEHDKAYDQQLKAGDNPYLRYNHADAEFQERLQEDTSFGGNLGRAVFQAKKRVLEPLGLVEEGAKTAPGKKRPVEPSPQRSPDSSTGIGKKGQQPAGKRLNFGQTGDSESVPDPQPIGEPPAAPSSVGSGTMAAGGGAPMADNNEGADGVGSSSGNWHCDSTWLGDRVITTSTRTWALPTYNNHLYKQISNGTSGGSTNDNTYFGYSTPWGYFDFNRFHCHFSPRDWQRLINNNWGFRPKRLSFKLFNIQVKEVTQNEGTKTIANNLTSTIQVFTDSEYQLPYVLGSAHQGCLPPFPADVFMIPQYGYLTLNNGSQAVGRSSFYCLEYFPSQMLRTGNNFSFSYTFEDVPFHSSYAHSQSLDRLMNPLVDQYLYYLSRTQSTGGTAGTQQLLFSQAGPSNMSAQARNWLPGPCYRQQRVSTTLSQNNNSNFAWTGATKYHLNGRDSLVNPGVAMATNKDDEDRFFPSSGILMFGKQGAGKDNVDYSNVMLTSEEEIKTTNPVATEQYGVVADNLQQQNTAPIVGAVNSQGALPGMVWQNRDVYLQGPIWAKIPHTDGNFHPSPLMGGFGLKHPPPQILIKNTPVPADPPTAFNQAKLNSFITQYSTGQVSVEIEWELQKENSKRWSPEIQYTSNYYKSTNVDFAVNTEGVYSEPRPIGTRYLTRNL

SEQ ID NO: 77 - protein, 738 aa, Adeno-associated virus
MAADGYLPDWLEDNLSEGIREWWDLKPGAPKPKANQQKQDDGRGLVLPGYKYLGPFNGLDKGEPVNAADAAALEHDKAYDQQLKAGDNPHLRYNHADAEFQERLQEDTSFGGNLGRAVFQAKKRVLEPLGLVEEGAKTAPGKKRPVEPSPQRSPDSSTGIGKKGQQPARKRLNFGQTGDSESVPDPQLIGEPPAAPSSVGSGTMAAGGGAPMADNNEGADGVGSSSGNWHCDSTWLGDRVITTSTRTWALPTYNNHLYKQISNGTSGGSTNDNTYFGYSTPWGYFDFNRFHCHFSPRDWQRLINNNWGFRPKRLSFKLFNIQVKEVTQNEGTKTIANNLTSTIQVFTDSEYQLPYVLGSAHQGCLPPFPADVFMIPQYGNLTLNNGSQAVGRSSFYCLEYFPSQMLRTGNNFSFSYTFEDVPFHSSYAHSQSLDRLMNPLIDQYLYYLSRTQSTGGTAGTQQLLFSQAGPSNMSAQARNWLPGPCYRQQRVSTTLSQNNNSNFAWTGATKYHLNGRDSLVNPGVAMATNKDDEDRFFPSSGILMFGKQGAGKDNMGYSNVMLTSEEEIKTTNPVATEQYGVVADNLQQQNTAPIVGAVNSQGALPGMVWQNRDVYLQGPIWAKIPHTDGNFHPSPLMGGFGLKHPPPQILIKNTPVPADPPTAFNQAKLNSFITQYGTGQVSVEIEWELQKENSKRWNPEIQYTSNYYKSTNVDFAVNTEGVYSEPRPIGTRYLTRNL

SEQ ID NO: 78 - protein, 738 aa, Adeno-associated virus
MAADGYLPDWLEDNLSEGIREWWDLKPGAPKPKANQQKQDDGRGLVLPGYKYLGPFNGLDKGEPVNAADAAALEHDKAYDQQLKAGDNPYLRYNHADAEFQERLQEDTSFGGNLGRAVFQAKKRVLEPLGLVEEGAKTAPGKKRPVEPSPQRSPDSSTGIGKKGQQPARKRLNFGQTGDSESVPDPQPIGEPPAAPSSVGSGTMAAGGGAPMADNNEGADGVGSSSGNWHCDSTWLGDRVITTSTRTWALPTYNNHLYKQISNGTSGGSTNDNTYFGYSTPWGYFDFNRFHCHFSPRDWQRPINNNWGFRPKRLSFKLFNIQVKEVTQNEGTKTIANNLTSTIQVFTDSEYQLPYVLGSAHQGCLPPFPADVFMIPQYGYLTLNNGSQAVGRSSFYCLEYFPSQMLRTGNNFSFSYPFEDVPFHSSYAHSQSLDRLMNPLIDQYLYYLSRTQSTGGTAGTQQLLFSQAGPSNMSAQARNWLPGPCYRQQRVSTTLSQNNNSNFAWTGATKYHLNGRDSLVNPGVAMATNKDDEDRFFPSSGILMFGKQGAGKDNVDYSNVMLTSEEEIKTTNPVATEQYGVVADNLQQQDTAPIVGAVNSQGALPGMVWQNRDVYLQGPIWAKIPHTDGNFHPSPLMGGFGLKHPPPQVLIKNTPVPADPPTAFNQAKLNSFITQYSTGQVSVEIEWELQKENSKRWNPEIQYTSNYYKSTNVDFAVNTEGVYSEPRPIGTRYLTRNL

SEQ ID NO: 79 - protein, 738 aa, Adeno-associated virus
MAADGYLPDWLEDNLSEGIREWWDLKPGAPKPKANQQKQDDGRGLVLPGYKYLGPFNGLDKGEPVNAADAAALEHDKAYDQQLKAGDNPYLRYNHADAEFQERLQEDTSFGGNLGRAVFQAKKRVLEPLGPVEEAAKTAPGKKRPVEPPPQRSPDSSTGIGKKGQQPAKKRLNFGQTGDSESVPDPQPIGEPPAGPSGLGSGTMAAGGGAPMADNNEGADGVGSSSGNWHCDSTWLGDRVITTSTRTWALPTYNNHLYKQISNGTSGGSTNDNTYFGYSTPWGYFDFNRFHCHFSPRDWQRLINNNWGFRPKRLSFKLFNIQVKEVTQNEGTKTVANNLTSTIQVFTDSEYQLPYVLGSAHQGCLPPFPADVFMIPQYGYLTLNNGSQAVGRSSFYCLEYFPSQMLRTGNNFEFSYTFEDVPFHSSYAHSQSLDRLMNPLIDQYLYYLSRTQSTGGTQGTQQLLFSQAGPANMSAQAKNWLPGPCYRQQRVSTTLSQNNNSNFAWTGATKYHLNGRDSLVNPGVAMATHKDDEERFFPSSGVLMFGKQGAGRDNVDYSSVMLTSEEEIKTTNPVATEQYGVVADNLQQTNTGPIVGNVNSQGALPGMVWQNRDVYLQGPIWAKIPHTDGNFHPSPLMGGFGLKHPPPQILIKNTPVPADPPTTFSQAKLASFITQYSTGQVSVEIEWELQKENSKRWNPEIQYTSNYYKSTNVDFAVNTEGTYSEPRPIGTRYLTRNL

SEQ ID NO: 80 - protein, 738 aa, Adeno-associated virus
MAADGYLPDWLEDNLSEGIREWWDLKPGAPKPKANQQKQDDGRGLVLPGYKYLGPFNGLDKGEPVNAADAAALEHDKAYDQQLKAGDNPYLRYNHADAEFQERLQEDTSFGGNLGRAVFQAKKRVLEPLGLVEEGAKTAPGKKRPVEPSPQRSPDSSTGIGKKGQQPARKRLNFGQTGDSESVPDPQPIGEPPAAPSSVGSGTMAAGGGAPMADNNEGADGVGSSSGNWHCDSTWLGDRVITTSTRTWALPTYNNHLYKQISNGTSGGSTNDNTYFGYSTPWGYFDFNRFHCHFSPRDWQRLINNNWGFRPKRLSFKLFNIQVKEVTQNEGTKTIANNLTSTIQVFTDSEYQLPYVLGSAHQGCLPPFPADVFMIPQYGYLTLNNGSQAVGRSSFYCLEYFPSQMLRTGNNFSFSYTFEDVPFHSSYAHSQSLDRLMNPLIDQYLYYLSRTQSTGGTAGTQQLLFSQAGPSNMSAQARNWLPGPCYRQQRVSTTLSQNNNSNFAWTGATKYHLNGRDSLVNPGVAMATNKDDEDRFFPSSGILMFGKQGAGKDNVDYSNVMLTSEEEIKTTNPVATEQYGVVADNLQQQNTAPIVGAVNSQGALPGMVWQNRDVYLQGPIWAKIPHTDGNFHPSPLMGGFGLKHPPPQILIKNTPVPADPPTAFNQAKLNSFITQYSTGQVSVEIVWELQKENSKRRNPEIQYTSNYYKSTNVDFAVNTEGVYSEPRPIGTRYLTRNL

SEQ ID NO: 81 - protein, 738 aa, Adeno-associated virus
MAADGYLPDWLEDNLSEGIREWWDLKPGAPKPKANQQKQDDGRGLVLPGYKYLGPFNGLDKGEPVNAADAAALEHDKAYDQQLKAGDNPYLRYNHADAEFQERLQEDTSFGGNLGRAVFQAKKRVLEPLGLVEEAAKTAPGKKRPVEPSPQRSPDSSTGIGKKGQQPAKKRLNFGQTGDSESVPDPQPIGEPPAGPSGLGSGTMAAGGGAPMADNNEGADGVGSSSGNWHCDSTWLGDRVITTSTRTWALPTYNNHLYKQISNGTSGGSTNDNTYFGYSTPWGYFDFNRFHCHFSPRDWQRLINNNWGFRPKRLSFKLFNIQVKEVTQNEGTKTIANNLTSTIQVFTDSEYQLPYVLGSAHQGCLPPFPADVFMIPQYGYLTLNNGSQAVGRSSFYCLEYFPSQMLRTGNNFEFSYTFEDVPFHSSYAHSQSLDRLMNPLIDQYLYYLSRTQSTGGTQGTQQLLFSQAGPANMSAQAKNWLPGPCYRQQRVSTTLSQSNNSNFAWTGATKYHLNGRDSLVNPGVAMATHKDDEERFFPSSGVLMFGKQGAGRDNVDYSSVMLTSEEEIKTTNPVATEQYGVVADNLQQTNTGPIVGNVNSQGALPGMVWQNRDVYLQGPIWAKIPHTDGNFHPSPLMGGLGLKHPPPQILIKNTPVPADPPTTFSQAKLASFITQYSTGQVSVEIEWELQKENSKRWNPEIQYTSNYYKSTNVDFAVNTEGTYSEPRPIGTRYLTRNL

SEQ ID NO: 82 - protein, 738 aa, Adeno-associated virus
MAADGYLPDWLEDNLSEGIREWWALKPGAPKPKANQQKQDDGRGLVLPGYKYLGPFNGLDKGEPVNAADAAALEHDKAYDQQLQAGDNPYLRYNHADAEFQERLQEDTSFGGNLGRAVFQAKKRVLEPLGLVEEGAKTAPGKKRPVEPSPQRSPDSSTGIGKKGQQPARKRLNFGQTGDSESVPDPQPIGEPPAAPSSVGSGTMAAGGGAPMADNNEGADGVGSSSGNWHCDSTWLGDRVITTSTRTWALPTYNNHLYKQTSNGTSGGSTNDNTYFGYSTPWGYFDFNRFHCHFSPRDWQRLINNNWGFRPKRLSFKLFNIQVKEVTQNEGTKTIANNLTSTIQVFTDSEYQLPYVLGSAHQGCLPPFPADVFMIPQYGYLTLNNGSQAVGRSSFYCLEYFPSQMLRTGNNFSFSYTFEDVPFHSSYAHSQSLDRLMNPLIDQYLYYLSRTQSTGGTAGTQQLLFSQAGPSNMSAQARNWLPGPCYRQQRVSTTLSQNNNSNFAWTGATKYHLNGRDSLVNPGVAMATNKDDEDRFFPSSGILMFGKQGAGKDNVDYSNVMLTSEEEIKTTNPVATEQYGVVADNLQQQNTAPIVGAVNSQGALPGMVWQNRDVYLQGPIWAKIPHTDGNFHPSPLMGGFGLKHPPPQILIKNTPVPADPPTAFNQAKLNSFITQYSTGQVSAEIEWELQKENSKRWNPEIQYTSNYYKSTNVDFAVNTEGVYSEPRPIGTRYLTRNL

SEQ ID NO: 83 - protein, 738 aa, Adeno-associated virus
MAADGYLPDWLEDNLSEGIREWWDLKPGAPKPKANQQKQDDGRGLVLPGYKYLGPFNGLDKGEPVNAADAAALEHDKAYDQQLKAGDNPYLRYNHADAEFQERLQEDTSFGGNLGRAVFQAKKRVLEPLGLVEEAAKTAPGKKRPVEPSPQRSPDSSTGIGKKGQQPAKKRLSFGQTGDSESVPDPQPIGEPPAGPSGLGSGTMAAGGGAPMADNNEGADGVGSSSGNWHCDSTWLGDRVITTSTRTWALPTYNNHLYKQISNGTSGGSTNDNTYFGYSTPWGYFDFNRFHCHFSPRDWQRLINNNWGFRPKRLSFKLFNIQVKEVTQNEGTKTIANNLTSTIQVFTDSEYQLPYVLGSAHQGCLPPFPADVFMIPQYGYLTLNNGSQAVGRSSFYCLEYFPSQMLRTGNNSEFSYTFEDVPFHSSYAHSQSLDRLMNPLIDQYLYYLSRTQSTGGTQGTQQLLFSQAGPANMSAQAKNWLPGPCYRQQRVSTTLSQNNNSNFAWTGATKYHLNGRDSLVNPGVAMATHKDDEERFFPSSGVLMFGKQGAGRDNVDYSSVMLTSEEEIKTTNPVATEQYGVVADNLQQTNTGPIVGNVNSQGALPGMVWQNRDVYLQGPIWAKIPHTDGNFHPSPLMGGFGLKHPPPQILIKNTPVPADPPTTFSQAKLASFITQYSTGQVSVEIEWELQKENSKRWNPEIQYTSNYYKSTNVDFAVNTEGTYSEPRPIGTRYLTRNL

SEQ ID NO: 84 - protein, 738 aa, Adeno-associated virus
MAADGYLPDWLEDNLSEGIREWWDLKPGAPKPKANQQKQDDGRGLVLLGYKYLGPFNGLDKGEPVNAADAAALEHDKAYDQQLKAGDNPYLRYNHADAEFQERLQEDTSFGGNLGRAVFQAKKRVLEPLGLVEEAAKTAPGKKRPVEPSPQRSPDSSTGIGKKGQQPAKKRLNFGQTGDSESVPDPQPIGEPPAGPSGLGSGTMAAGGGAPMADNNEGADGVGSSSGNWHCDSTWLGDRVITTSTRTWALPTYNNHLYKQISNGTSGGSTNDNTYFGYSTPWGYFDFNRFHCHFSPRDWQRLINNNWGFRPKRLSFKLFNIQVKEVTQNEGTKTIANNLTSTIQVFTDSEYQLPYVLGSAHQGCLPPFPADVFMIPQYGYLTLNNGSQAVGRSSFYCLEYFPSQMLRTGNNFEFSYTFEDVPFHSGYAHSQSLDRLMNPLIDQYLYYLSRTQSTGGTQGTQQLLFSQAGPANMSAQAKNWLPGPCYRQQRVSTTLSQNNNSNFAWTGATKYHLNGRDSLVNPGVAMATHKDDEERFFPSSGVLMFGKQGAGRDNVDYSSVMLTSEEEIKTTNPVATEQYGVVADNLQQTNTGPIVGNVNSQGALPGMVWQNRDVYLQGPIWAKIPHTDGNFHPSPLMGGFGLKHPPPQILIKNTPVPADPPTTFSQAKLASFITQYSTGQVSVEIEWELQKENSKRWNPEIQYTSNYYKSTNVDFAVNTEGTYSEPRPIGTRYLTRNL

SEQ ID NO: 85 - protein, 738 aa, Adeno-associated virus
MAADGYLPDWLEDNLSEGIREWWDLKPGAPKPKANQQKQDDGRGLVLPGCKYLGPFNGLDKGEPVNAADAAALEHDKAYDQQLKAGDNPYLRYNHADAEFQERLQEDTSFGGNLGRAVFQAKKRVLEPLGLVEEGAKTAPGKKRPVEPSPQRSPDSSTGIGKTGQQPAKKRLNFGQTGDSESVPDPQPIGEPPAGPSGLGSGTMAAGGGAPMADNNEGADGVGSSSGNWHCDSTWLGDRVITTSTRTWALPTYNNHLYKQISNGTSGGSTNDNTYFGYSTPWGYFDFNRFHCHFSPRDWQRLINNNWGFRPKRLNFKLFNIQVKEVTQNEGTKTIANNLTSTIQVFTDSEYQLPYVLGSAHQGCPPPFPADVFMIPQYGYLTLNNGSQAVGRSSFYCLEYFPSQMRRTGNNFEFSYQFEDVPFHSSYAHSQSLDRLMNPLIDQYLYYLSRTQSTGGTAGTQQLLFSQAGPNNMSAQAKNWLPGPCYRQQRVSTTLSQNNNSNFAWTGATKYHLNGRDSLVNPGVAMATHKDDEERFFPSSGVLMFGKQGAGKDNVDYSSVMLTSEEEIKTTNPVATEQYGVVADNLQQQNAAPIVGAVNSQGALPGMVWQNRDVYLQGPIWAKIPHTDGNFHPSPLMGGFGLKHPPPQILIKNTPVPADPPTTFSQAKLASFITQYSTGQVSVEIEWELQKENSKRWNPEIQYTSNYNKSVNVDFTVDTNGVYSEPRPIGTRYLTRNL

SEQ ID NO: 86 - protein, 738 aa, Adeno-associated virus
MAADGYLPDWLEDNLSEGIREWWDLKPGAPKPKANQQKQDDGRGLVLPGYKYLGPFNGLDKGEPVNAADAAALEHDKAYDQQLKAGDNPYLRYNHADAEFQERLQEDTSFGGNLGRAVFQAKKRVLEPLGLVEEGAKTAPGKKRPVEPSPQRSPDSSTGIGKTGQQPAKKRLNFGQTGDSESVPDPQPIGEPPAGPSGLGSGTMAAGGGAPMADNNEGADGVGSSSGNWHCDSAWLGDRVITTSTRPWALPTYNNHLYKQISNGTSGGSTNDNTYFGYSTPWGYFDFNRFHCHFSPRDWQRLINNNWGFRPKRLNFKLFNIQVKEVTQNEGTKTIANNLTSTIQVFTDSEYQLPYVLGSAHQGCPPPFPADVFMIPQYGYLTLNNGSQAVGRSSFYCLEYFPSQMRRTGNNFEFSYQFEDVPFHSSYAHSQSLDRLMNPLIDQYLYYLSRTQSTGGTAGTQQLLFSQAGPNNMSAQAKNWLPGPCYRQQRVSTTLSQNNNSNFAWTGATKYHLNGRDSLVNPGVAMATHKDDEERFFPSSGVLMFGKQGAGKDNVDYSSVMLTSEEEIKTTNPVATEQYGVVADNLQQQNAAPIVGAVNSQGALPGMVWQNRDVYLQGPIWAKIPHTDGNFHPSPLMGGFGLKHPPPQILIKNTPVPADPPTTFSQAKLASFITQYSTGQVSVEIEWELQKENSKRWNPEIQYTSNYYKSTNVDFAVNTEGTYSEPRPIGTRYLTRNL

SEQ ID NO: 87 - protein, 738 aa, Adeno-associated virus
MAADGYLPDWLEDNLSEGIREWWDLKPGAPKPKANQQKQDDGRGLVLPGYKYLGPFNGLDKGEPVNAADAAALEHDKAYDQQLKAGDNPYLRYNHADAEFQERLQEDTSFGGNLGRAVFQAKKRVLEPLGLVEEAAKTAPGKKRPVEPSPQRSPDSSAGIGKKGQQPAKKRLNFGQTGDSESVPDPQPIGEPPAGPSGLGSGTMAAGGGAPMADNNEGADGVGSSSGNWHCDSTWLGDRVITTSTRTWALPTYNNHLYKQISNGTSGGSTNDNTYFGYSTPWGYFDFNRFHCHFSPRDWQRLINNNWGFRPKRLSFKLFNIQVKEVTQNEGTETIANNLTSTIQVFTDSEYQLPYVLGSAHQGCLPPFPADVFMIPQYGYLTLNNGSQAVGRSSFYCLEYFPSQMLRTGNNFEFSYTFEDVPFHSSCAHSQSSDRLMNPLIDQYLYYLSRTRSTGGTQGTQQLLFSQAGPANMSAQAKNWLPGPCYRQQRVSTTLSQNNNSNFAWTGATKYHLNGRDSLVNPGVAMATHKDDEERFFPSSGVLMFGKQGAGRDNVDYSSVMLTSEEEIKTTNPVATEQYGVVADNLQQTNTGPIVGNVNSQGALPGMVWQNRDVYLQGPIWAKIPHTDGNFHPSPLMGGFGLKHPPPQILIKNTPVPADPPTTFSQAKLASFITQYSTGQVSVEIEWELQKENSKRWNPEIQYTSNYYKSTNVDFAVNTEGTYSEPRPIGTRYLTRNL

SEQ ID NO: 88 - protein, 738 aa, Adeno-associated virus
MAADGYLPDWLEDNLSEGIREWWDLKPGAPKPKANQQKQDDGRGLVLPGYKYLGPFNGLDKGEPVNAADAAALEHDKAYDQQLKAGDNPYLRYNHADAEFQERLQEDTSFGGNLGRAVFQAKKRVLEPLGLVEEAAKTAPGKKRPVEPSPQRSPDSSTGIGKKGQRPAKKRLNFGQTGDSESVPDPQPIGEPPAGPSGLGSGTMAAGGGAPMADNNEGADGVGSSSGNWHCDSTWLGDRVITTSTRTWALPTYNNHLYKQISNGTSGGSTNDNTYFGYSTPWGYFDFNRFHCHFSPRDWQRLINNNWGFRPKRLSFKPFNIQVKEVTQNEGTKTIANNLTSTIQVFTDSEYQLPYVLGSAHQGCLPPFPADVFMIPQYGYLTLNNGSQAVGRSSFYCLEYFPSQMLRTGNNFEFSYTFEDVPFHSSYAHSQSLDRLMNPLIDQYLHYLSRTQSTGGTQGTQQLLFSQAGPANMSAQAKNWLPGPCYRQQRVSTTLSQNNNSNFAWTGATKYHLNGRDSLVNPGVAMATHKDDEERFFPSSGVLMFGKQGAGRDNVDYSSVMLTSEEEIKTTNPVATEQYGVVADNLQQTNTGPIVGNVNSQGALPGMVWQNRDVYLQGPIWAKIPHTDGNFHPSPLMGGFGLKHPPPQILIKNTPVPADPPTTFSQAKLASFITQYSTGQVSVEIEWELQKENSKRWNPEIQYTSNYYKSTNVDFAVNTEGTYSEPRPIGTRYLTRNL

SEQ ID NO: 89 - protein, 736 aa, Adeno-associated virus
MAADGYLPDWLEDTLSEGIRQWWKLKPGPPPPKPAERHKDDSRGLVLPGYKYLGPGNGLDKGEPVNAADAAALEHDKAYDQQLKAGDNPYLKYNHADAEFQERLKEDTSFGGNLGRAVFQAKKRLLEPLGLVEEAAKTAPGKKRPVEQSPQEPDSSAGIGKSGSQPAKKKLNFGQTGDTESVPDPQPIGEPPAAPSGVGSLTMASGGGAPVADNNEGADGVGSSSGNWHCDSQWLGDRVITTSTRTWALPTYNNHLYKQISNSTSGGSSNDNAYFGYSTPWGYFDFNRFHCHFSPRDWQRLINNNWGFRPKRLNFKLFNIQVKEVTDNNGVKTIANNLTSTVQVFTDSDYQLPYVLGSAHEGCLPPFPADVFMIPQYGYLTLNDGSQAVGRSSFYCLEYFPSQMLRTGNNFQFSYEFENVPFHSSYAHSQSLDRLMNPLIDQYLYYLSKTINGSGQNQQTLKFSVAGPSNMAVQGRNYIPGPSYRQQRVSTTVTQNNNSEFAWPGASSWALNGRNSLMNPGPAMASHKEGEDRFFPLSGSLIFGKQGTGRDNVDADKVMITNEEEIKTTNPVATESYGQVATNHQSAQAQAQTGWVQNQGILPGMVWQDRDVYLQGPIWAKIPHTDGNFHPSPLMGGFGMKHPPPQILIKNTPVPADPPTAFNKDKLNSFITQYSTGQVSVEIEWELQKENSKRWNPEIQYTSNYYKSNNVEFAVNTEGVYSEPRPIGTRYLTRNL

SEQ ID NO: 90 - protein, 736 aa, Adeno-associated virus; identical to SEQ ID NO: 12

SEQ ID NO: 91 - protein, 736 aa, Adeno-associated virus
MAADGYLPDWLEDTLSEGIRQWWKLKPGPPPPKPAERHKDDSRGLVLPGYKYLGPGNGLDKGEPVNAADAAALEHDKAYDQQLKAGDNPYLKYNHADAEFQERLKEDTSFGGNLGRAVFQAKKRLLEPLGLVEEAAKTAPGKKRPVEQSPQEPDSSAGIGKSGSQPAKKKLNFGQTGDTESVPDPQPIGEPPAAPSGVGSLTMASGGGAPVADNNEGADGVGSSSGNWHCDSQWLGDRVITTSTRTWALPTYNNHLYKQISNSTSGGSSNDNAYFGYSTPWGYFDFNRFHCHFSPRDWQRLINNNWGFRPKRLNFKLFNIQVKEVTDNNGVKTIANNLTSTVQVFTDSDYQLPYVLGSAHEGCLPPFPADVFMIPQYGYLTLNDGGQAVGRSSFYCLEYFPSQMLRTGNNFQFSYEFENVPFHSSYAHSQSLDRLMNPLIDQYLYYLSKTINGSGQNQQTLKFSVAGPSNMAVQGRNYIPGPSYRQQRVSTTVTQNNNSEFAWPGASSWALNGRNSLMNPGPAMASHKEGEDRFFPLSGSLIFGKQGTGRDNVDADKVMITNEEEIKTTNPVATESYGQVATNHQSAQAQAQTGWVQNQGILPGMVWQDRDVYLQGPIWAKIPHTDGNFHPSPLMGGFGMKHPPPQILIKNTPVPADPPTAFNKDKLNSFITQYSTGQVSVEIEWELQKENSKRWNPEIQYTSNYYKSNNVEFAVSTEGVYSEPRPIGTRYLTRNL

SEQ ID NO: 92 - protein, 736 aa, Adeno-associated virus
MAADGYLPDWLEDNLSEGIREWWDLKPGAPKPKANQQKQDDGRGLVLPGYKYLGPFNGLDKGEPVNAADAAALEHDKAYDQQLKAGDNPYLRYNHADAEFQERLQEDTSFGGNLGRAVFQAKKRVLEPLGLVEEGAKTAPGKKRPVEQSPQEPDSSSGIGKKGQQPAKKRLNFGQTGDSESVPDPQPLGEPPAAPSGVGSNTMASGGGAPMADNNEGADGVGNASGNWHCDSTWLGDRVITTSTRTWALPTYNNHLYKQISSQSGASTNDNTYFGYSTPWGYFDFNRFHCHFSPRDWQRLINNNWGFRPKRLNFKLFNIQVKEVTTNDGTTTIANNLTSTVQVFTDSEYQLPYVLGSAHQGCLPPFPADVFMIPQYGYLTLNNGSQAVGRSSFYCLEYFPSQMLRTGNNFQFSYTFEDVPFHSSYAHSQSLDRLMNPLIDQYLYYLSRTQTTSGTAGNRELQFSQAGPSSNANQAKNWLPGPCYRQQRVSKTTNQNNNSNFAWTGATKYHLNGRDSLVNPGPAMATHKDDEDKFFPMSGVLIFGKQGAGNSNVDLDNVMITSEEEIKTTNPVATEEYGTVATNLQSSNTAPATGTVNSQGALPGMVWQDRDVYLQGPIWAKIPHTDGHFHPSPLMGGFGLKHPPPQILIKNTPVPANPPTTFSPAKFASFITQYSTGQVSVEIEWELQKENSKRWNPEIQYTSNYNKSTNVDFAVDTNGVYSEPRPIGTRYLTRNL

SEQ ID NO: 93 - protein, 737 aa, Adeno-associated virus
MAADGYLPDWLEDNLSEGIREWWDLKPGAPKPKANQQKQDDGRGLVLPGYKYLGPFNGLDKGEPVNAADAAALEHDKAYDQQLKAGDNPYLRYNHADAEFQERLQEDTSFGGNLGRAVFQAKKRVLEPLGLVEEGAKTAPGKKRPVEQSPQEPDSSTGIGKKGQQPAKKRLNFGQTGDSESVPDPQPLGEPPAAPSGVGSNTMAAGGGAPMADNNEGADGVGNASGNWHCDSTWLGDRVITTSTRTWALPTYNNHLYKQISNSQSGGSTNDNTYFGYSTPWGYFDFNRFHCHFSPRDWQRLINNNWGFRPKRLNFKLFNIQVKEVTTNDGTTTIANNLTSTVQVFTDSEYQLPYVLGSAHQGCLPPFPADVFMIPQYGYLTLNNGSQAVGRSSFYCLEYFPSQMLRTGNNFEFSYTFEDVPFHSSYAHSQSLDRLMNPLIDQYLYYLSRTQTTGGTAGNRTLQFSQAGPSSMANQAKNWLPGPCYRQQRVSKTTNQNNNSNFAWTGATKYHLNGRDSLVNPGVAMATHKDDEDRFFPSSGVLIFGKQGAGNDNVDLDNVMITSEEEIKTTNPVATEEYGVVATNLQSANTAPQTGTVNSQGALPGMVWQNRDVYLQGPIWAKIPHTDGNFHPSPLMGGFGLKHPPPQILIKNTPVPANPPTTFSPAKFASFITQYSTGQVSVEIEWELQKENSKRWNPEIQYTSNYNKSTNVDFAVDTEGVYSEPRPIGTRYLTRNL

SEQ ID NO: 94 - protein, 738 aa, Adeno-associated virus
MAADGYLPDWLEDNLSEGIREWWDLKPGAPKPKANQQKQDDGRGLVLPGYKYLGPFNGLDKGEPVNAADAAALEHDKAYDQQLKAGDNPYLRYNHADAEFQERLQEDTSFGGNLGRAVFQAKKRVLEPLGLVEEGAKTAPGKKRPVEQSPQREPDSSTGIGKKGQQPAKKRLNFGQTGDSESVPDPQPLGEPPAAPSGVGSNTMAAGGGAPMADNNEGADGVGNSSGNWHCDSTWLGDRVITTSTRTWALPTYNNHLYKQISNGTSGGSTNDNTYFGYSTPWGYFDFNRFHCHFSPRDWQRLINNNWGFRPKRLNFKLFNIQVKEVTTNEGTKTIANNLTSTVQVFTDSEYQLPYVLGSAHQGCLPPFPADVFMIPQYGYLTLNNGSQAVGRSSFYCLEYFPSQMLRTGNNFQFSYTFEDVPFHSSYAHSQSLDRLMNPLIDQYLYYLSRTQTTGGTAGTQTLQFSQAGPSSMANQAKNWLPGPCYRQQRVSTTTNQNNNSNFAWTGATKYHLNGRDSLVNPGVAMATHKDDEDRFFPSSGVLIFGKQGAGNDNVDYSNVMITSEEEIKTTNPVATEEYGVVATNLQSANTAPQTGTVNSQGALPGMVWQNRDVYLQGPIWAKIPHTDGNFHPSPLMGGFGLKHPPPQILIKNTPVPADPPTTFNQAKLNSFITQYSTGQVSVEIEWELQKENSKRWNPEIQYTSNYYKSTNVDFAVNTEGVYSEPRPIGTRYLTRNL

SEQ ID NO: 95 - protein, 738 aa, Adeno-associated virus
MAADGYLPDWLEDNLSEGIREWWDLKPGAPKPKANQQKQDDGRGLVLPGYKYLGPFNGLDKGEPVNAADAAALEHDKAYDQQLKAGDNPYLRYNHADAEFQERLQEDTSFGGNLGRAVFQAKKRVLEPLGLVEEGAKTAPGKKRPVEQSPQREPDSSTGIGKKGQQPARKRLNFGQTGDSESVPDPQPLGEPPAAPSGVGSNTMAAGGGAPMADNNEGADGVGSSSGNWHCDSTWLGDRVITTSTRTWALPTYNNHLYKQISNGTSGGSTNDNTYFGYSTPWGYFDFNRFHCHFSPRDWQRLINNNWGFRPKRLNFKLFNIQVKEVTQNEGTKTIANNLTSTIQVFTDSEYQLPYVLGSAHQGCLPPFPADVFMIPQYGYLTLNNGSQAVGRSSFYCLEYFPSQMLRTGNNFQFSYTFEDVPFHSSYAHSQSLDRLMNPLIDQYLYYLSRTQTTGGTAGTQTLQFSQAGPSNMANQAKNWLPGPCYRQQRVSTTTSQNNNSNFAWTGATKYHLNGRDSLVNPGVAMATHKDDEDRFFPSSGILIFGKQGAGKDNVDYSNVMLTSEEEIKTTNPVATEEYGVVADNLQQQNTAPQIGTVNSQGALPGMVWQNRDVYLQGPIWAKIPHTDGNFHPSPLMGGFGLKHPPPQILIKNTPVPADPPTTFNQAKLNSFITQYSTGQVSVEIEWELQKENSKRWNPEIQYTSNYYKSTNVDFAVNTEGVYSEPRPIGTRYLTRNL

SEQ ID NO: 96 - protein, 738 aa, Adeno-associated virus
MAADGYLPDWLEDNLSEGIREWWDLKPGAPKPKANQQKQDDGRGLVLPGYKYLGPFNGLDKGEPVNAADAAALEHDKAYDQQLKAGDNPYLRYNHADAEFQERLQEDTSFGGNLGRAVFQAKKRVLEPLGLVEEGAKTAPGKKRPVEPSPQRSPDSSTGIGKKGQQPARKRLNFGQTGDSESVPDPQPIGEPPAAPSGVGSGTMAAGGGAPMADNNEGADGVGSSSGNWHCDSTWLGDRVITTSTRTWALPTYNNHLYKQISNGTSGGSTNDNTYFGYSTPWGYFDFNRFHCHFSPRDWQRLINNNWGFRPKRLNFKLFNIQVKEVTQNEGTKTIANNLTSTIQVFTDSEYQLPYVLGSAHQGCLPPFPADVFMIPQYGYLTLNNGSQAVGRSSFYCLEYFPSQMLRTGNNFEFSYTFEDVPFHSSYAHSQSLDRLMNPLIDQYLYYLSRTQSTGGTAGTQQLLFSQAGPSNMSAQAKNWLPGPCYRQQRVSTTLSQNNNSNFAWTGATKYHLNGRDSLVNPGVAMATHKDDEDRFFPSSGILMFGKQGAGKDNVDYSNVMLTSEEEIKTTNPVATEQYGVVADNLQQQNTAPIVGAVNSQGALPGMVWQNRDVYLQGPIWAKIPHTDGNFHPSPLMGGFGLKHPPPQILIKNTPVPADPPTTFNQAKLNSFITQYSTGQVSVEIEWELQKENSKRWNPEIQYTSNYYKSTNVDFAVNTEGVYSEPRPIGTRYLTRNL

SEQ ID NO: 97 - protein, 738 aa, Adeno-associated virus
MAADGYLPDWLEDNLSEGIREWWDLKPGAPKPKANQQKQDDGRGLVLPGYKYLGPFNGLDKGEPVNAADAAALEHDKAYDQQLKAGDNPYLRYNHADAEFQERLQEDTSFGGNLGRAVFQAKKRVLEPLGLVEEGAKTAPGKKRPVEPSPQRSPDSSTGIGKKGQQPAKKRLNFGQTGDSESVPDPQPIGEPPAGPSGLGSGTMAAGGGAPMADNNEGADGVGSSSGNWHCDSTWLGDRVITTSTRTWALPTYNNHLYKQISNGTSGGSTNDNTYFGYSTPWGYFDFNRFHCHFSPRDWQRLINNNWGFRPKRLNFKLFNIQVKEVTQNEGTKTIANNLTSTIQVFTDSEYQLPYVLGSAHQGCLPPFPADVFMIPQYGYLTLNNGSQAVGRSSFYCLEYFPSQMLRTGNNFEFSYTFEDVPFHSSYAHSQSLDRLMNPLIDQYLYYLSRTQSTGGTAGTQQLLFSQAGPSNNSAQAKNWLPGPCYRQQRVSTTLSQNNNSNFAWTGATKYHLNGRDSLVNPGVAMATHKDDEERFFPSSGVLMFGKQGAGKDNVDYSSVMLTSEEEIKTTNPVATEQYGVVADNLQQQNTAPIVGAVNSQGALPGMVWQNRDVYLQGPIWAKIPHTDGNFHPSPLMGGFGLKHPPPQILIKNTPVPADPPTTFSQAKLASFITQYSTGQVSVEIEWELQKENSKRWNPEIQYTSNYYKSTNVDFAVNTEGTYSEPRPIGTRYLTRNL

SEQ ID NO: 98 - protein, 737 aa, Adeno-associated virus
MAADGYLPDWLEDNLSEGIREWWDLKPGAPKPKANQQKQDDGRGLVLPGYKYLGPFNGLDKGEPVNAADAAALEHDKAYDQQLKAGDNPYLRYNHADAEFQERLQEDTSFGGNLGRAVFQAKKRVLEPLGLVEEGAKTAPGKKRPVEPSPQRSPDSSTGIGKKGQQPAKKRLNFGQTGDSESVPDPQPLGEPPAAPSGVGSGTMAAGGGAPMADNNEGADGVGNASGNWHCDSTWLGDRVITTSTRTWALPTYNNHLYKQISSQSAGSTNDNTYFGYSTPWGYFDFNRFHCHFSPRDWQRLINNNWGFRPKKLRFKLFNIQVKEVTTNDGVTTIANNLTSTVQVFSDSEYQLPYVLGSAHQGCLPPFPADVFMIPQYGYLTLNNGSQSVGRSSFYCLEYFPSQMLRTGNNFEFSYTFEDVPFHSSYAHSQSLDRLMNPLIDQYLYYLARTQSTTGGTAGNRELQFYQAGPSTMAEQAKNWLPGPCYRQQRVSKTLDQNNNSNFAWTGATKYHLNGRNSLVNPGVAMATHKDDEDRFFPSSGVLIFGKTGAANKTTLENVLMTNEEEIKTTNPVATEEYGVVSSNLQSANTAPQTQTVNSQGALPGMVWQNRDVYLQGPIWAKIPHTDGNFHPSPLMGGFGLKHPPPQILIKNTPVPANPPEVFTPAKFASFITQYSTGQVSVEIEWELQKENSKRWNPEIQYTSNYDKSTNVDFAVDSEGVYSEPRPIGTRYLTRNL

SEQ ID NO: 99 - protein, 735 aa, Adeno-associated virus
MAADGYLPDWLEDNLSEGIREWWDLKPGAPKPKANQQKQDDGRGLVLPGYKYLGPFNGLDKGEPVNAADAAALEHDKAYDQQLKAGDNPYLRYNHADAEFQERLQEDTSFGGNLGRAVFQAKKRVLEPLGLVEEGAKTAPGKKRPVEQSPQEPDSSSGIGKSGQQPAKKRLNFGQTGDSESVPDPQPLGEPPAAPSGVGSNTMASGGGAPMADNNEGADGVGNASGNWHCDSTWLGDRVITTSTRTWALPTYNNHLYKQISSQSGASNDNHYFGYSTPWGYFDFNRFHCHFSPRDWQRLINNNWGFRPKRLNFKLFNIQVKEVTTNDGTTTIANNLTSTVQVFTDSEYQLPYVLGSAHQGCLPPFPADVFMIPQYGYLTLNNGSQAVGRSSFYCLEYFPSQMLRTGNNFTFSYTFEDVPFHSSYAHSQSLDRLMNPLIDQYLYYLSRTQTTSGTAQNRELQFSQAGPSSMANQAKNWLPGPCYRQQRVSKTANDNNNSNFAWTGATKYHLNGRDSLVNPGPAMASHKDDEDKFFPMSGVLIFGKQGAGASNVDLDNVMITDEEEIKTTNPVATEQYGTVATNLQSSNTAPATGTVNSQGALPGMVWQDRDVYLQGPIWAKIPHTDGHFHPSPLMGGFGLKHPPPQILIKNTPVPANPPTTFSPAKFASFITQYSTGQVSVEIEWELQKENSKRWNPEIQYTSNYNKSANVDFTVDTNGVYSEPRPIGTRYLTRNL

SEQ ID NO: 100 - protein, 735 aa, Adeno-associated virus
MAADGYLPDWLEDNLSEGIREWWDLKPGAPQPKANQQHQDDGRGLVLPGYKYLGPFNGLDKGEPVNEADAAALEHDKAYDQQLKAGDNPYLKYNHADAEFQERLQEDTSFGGNLGRAVFQAKKRVLEPLGLVEEAAKTAPGKKRPVEQSPQEPDSSSGIGKSGQQPARKRLNFGQTGDSESVPDPQPLGEPPAAPSGVGSNTMASGGGAPMADNNEGADGVGNSSGNWHCDSTWLGDRVITTSTRTWALPTYNNHLYKQISSQSGASNDNHYFGYSTPWGYFDFNRFHCHFSPRDWQRLINNNWGFRPKKLNFKLFNIQVKEVTQNDGTTTIANNLTSTVQVFTDSEYQLPYVLGSAHQGCLPPFPADVFMIPQYGYLTLNNGSQAVGRSSFYCLEYFPSQMLRTGNNFTFSYTFEDVPFHSSYAHSQSLDRLMNPLIDQYLYYLSRTQTTSGTTQQSRLQFSQAGPSSMAQQAKNWLPGPCYRQQRVSKTANDNNNSNFAWTGATKYHLNGRDSLVNPGPAMASHKDDEEKFFPMHGVLIFGKQGTGASNVDLDNVMITDEEEIRTTNPVATEQYGTVATNLQSSNTAPATGTVNSQGALPGMVWQDRDVYLQGPIWAKIPHTDGHFHPSPLMGGFGLKHPPPQILIKNTPVPANPPTTFSPAKFASFITQYSTGQVSVEIEWELQKENSKRWNPEIQYTSNYNKSVNVDFTVDTNGVYSEPRPIGTRYLTRNL

SEQ ID NO: 101 - protein, 736 aa, Adeno-associated virus
MAADGYLPDWLEDNLSEGIREWWDLKPGAPKPKANQQKQDDGRGLVLPGYKYLGPFNGLDKGEPVNAADAAALEHDKAYDQQLKAGDNPYLRYNHADAEFQERLQEDTSFGGNLGRAVFQAKKRVLEPLGLVEEGAKTAPGKKRPVEQSPQEPDSSSGIGKKGQQPARKRLNFGQTGDSESVPDPQPLGEPPAAPSGVGSNTMAAGGGAPMADNNEGADGVGNASGNWHCDSTWLGDRVITTSTRTWALPTYNNHLYKQISSQSGGSTNDNTYFGYSTPWGYFDFNRFHCHFSPRDWQRLINNNWGFRPKRLNFKLFNIQVKEVTTNDGTTTIANNLTSTVQVFTDSEYQLPYVLGSAHQGCLPPFPADVFMIPQYGYLTLNNGSQAVGRSSFYCLEYFPSQMLRTGNNFEFSYTFEDVPFHSSYAHSQSLDRLMNPLIDQYLYYLSRTQTTSGTAGNRTLQFSQAGPSSMANQAKNWLPGPCYRQQRVSKTANQNNNSNFAWTGATKYHLNGRDSLVNPGPAMATHKDDEDKFFPMSGVLIFGKQGAGNSNVDLDNVMITNEEEIKTTNPVATEQYGTVATNLQSANTAPATGTVNSQGALPGMVWQDRDVYLQGPIWAKIPHTDGHFHPSPLMGGFGLKHPPPQILIKNTPVPANPPTTFSPAKFASFITQYSTGQVSVEIEWELQKENSKRWNPEIQYTSNYNKSTNVDFAVDTNGVYSEPRPIGTRYLTRNL

SEQ ID NO: 102 - protein, 736 aa, Adeno-associated virus
MAADGYLPDWLEDNLSEGIREWWDLKPGAPKPKANQQKQDDGRGLVLPGYKYLGPFNGLDKGEPVNAADAAALEHDKAYDQQLKAGDNPYLRYNHADAEFQERLQEDTSFGGNLGRAVFQAKKRVLEPLGLVEEGAKTAPGKKRPVEQSPQEPDSSSGIGKKGQQPAKKRLNFGQTGDSESVPDPQPLGEPPAAPSGVGSNTMASGGGAPMADNNEGADGVGNASGNWHCDSTWLGDRVITTSTRTWALPTYNNHLYKQISSQSGASTNDNTYFGYSTPWGYFDFNRFHCHFSPRDWQRLINNNWGFRPKRLNFKLFNIQVKEVTTNDGTTTIANNLTSTVQVFTDSEYQLPYVLGSAHQGCLPPFPADVFMIPQYGYLTLNNGSQAVGRSSFYCLEYFPSQMLRTGNNFQFSYTFEDVPFHSSYAHSQSLDRLMNPLIDQYLYYLSRTQTTSGTAGNRELQFSQAGPSSMANQAKNWLPGPCYRQQRVSKTTNQNNNSNFAWTGATKYHLNGRDSLVNPGPAMATHKDDEDKFFPMSGVLIFGKQGAGNSNVDLDNVMITNEEEIKTTNPVATEEYGTVATNLQSANTAPATGTVNSQGALPGMVWQNRDVYLQGPIWAKIPHTDGHFHPSPLMGGFGLKHPPPQILIKNTPVPANPPTTFSPAKFASFITQYSTGQVSVEIEWELQKENSKRWNPEIQYTSNYNKSTNVDFAVDTNGVYSEPRPIGTRYLTRNL

SEQ ID NO: 103 - protein, 736 aa, Adeno-associated virus
MAADGYLPDWLEDNLSEGIREWWDLKPGAPKPKANQQKQDDGRGLVLPGYKYLGPFNGLDKGEPVNAADAAALEHDKAYDQQLKAGDNPYLRYNHADAEFQERLQEDTSFGGNLGRAVFQAKKRVLEPLGLVEEGAKTAPGKKRPVEQSPQEPDSSSGIGKKGQQPARKRLNFGQTGDSESVPDPQPLGEPPAAPSGVGSNTMAAGGGAPMADNNEGADGVGNASGNWHCDSTWLGDRVITTSTRTWALPTYNNHLYKQISSQSGGSTNDNTYFGYSTPWGYFDFNRFHCHFSPRDWQRLINNNWGFRPKRLNFKLFNIQVKEVTTNDGTTTIANNLTSTVQVFTDSEYQLPYVLGSAHQGCLPPFPADVFMIPQYGYLTLNNGSQAVGRSSFYCLEYFPSQMLRTGNNFEFSYTFEDVPFHSSYAHSQSLDRLMNPLIDQYLYYLSRTQTTSGTAGNRELQFSQAGPSSMANQAKNWLPGPCYRQQRVSKTTNQNNNSNFAWTGATKYHLNGRDSLVNPGPAMATHKDDEDKFFPMSGVLIFGKQGAGNSNVDLDNVMITSEEEIKTTNPVATEEYGTVATNLQSSNTAPATGTVNSQGALPGMVWQERDVYLQGPIWAKIPHTDGHFHPSPLMGGFGLKHPPPQILIKNTPVPANPPTTFSPAKFASFITQYSTGQVSVEIEWELQKENSKRWNPEIQYTSNYNKSTNVDFAVDTNGVYSEPRPIGTRYLTRNL

SEQ ID NO: 104 - protein, 736 aa, Adeno-associated virus
MAADGYLPDWLEDNLSEGIREWWDLKPGAPKPKANQQKQDDGRGLVLPGYKYLGPFNGLDKGEPVNAADAAALEHDKAYDQQLKAGDNPYLRYNHADAEFQERLQEDTSFGGNLGRAVFQAKKRVLEPLGLVEEGAKTAPGKKRPVEQSPQEPDSSSGIGKKGQQPARKRLNFGQTGDSESVPDPQPLGEPPAAPSGVGSNTMASGGGAPMADNNEGADGVGNASGNWHCDSTWLGDRVITTSTRTWALPTYNNHLYKQISSQSGGSTNDNTYFGYSTPWGYFDFNRFHCHFSPRDWQRLINNNWGFRPKKLNFKLFNIQVKEVTTNDGTTTIANNLTSTVQVFTDSEYQLPYVLGSAHQGCLPPFPADVFMIPQYGYLTLNNGSQAVGRSSFYCLEYFPSQMLRTGNNFEFSYTFEDVPFHSSYAHSQSLDRLMNPLIDQYLYYLSRTQTTSGTAGNRELQFSQAGPSSMANQAKNWLPGPCYRQQRVSKTTNQNNNSNFAWTGATKYHLNGRDSLVNPGPAMATHKDDEDKFFPMSGVLIFGKQGAGNSNVDLDNVMITSEEEIKTTNPVATEEYGTVATNLQSANTAPATGTVNSQGALPGMVWQDRDVYLQGPIWAKIPHTDGHFHPSPLMGGFGLKHPPPQILIKNTPVPANPPTTFSPAKFASFITQYSTGQVSVEIEWELQKENSKRWNPEIQYTSNYNKSTNVDFAVDTNGVYSEPRPIGTRYLTRNL

SEQ ID NO: 105 - protein, 736 aa, Adeno-associated virus
MAADGYLPDWLEDNLSEGIREWWDLKPGAPKPKANQQKQDDGRGLVLPGYKYLGPFNGLDKGEPVNAADAAALEHDKAYDQQLKAGDNPYLRYNHADAEFQERLQEDTSFGGNLGRAVFQAKKRVLEPLGLVEEGAKTAPGKKRPVEQSPQEPDSSSGIGKKGQQPARKRLNFGQTGDSESVPDPQPLGEPPAAPSGVGSNTMAAGGGAPMADNNEGADGVGNASGNWHCDSTWLGDRVITTSTRTWALPTYNNHLYKQISSQSGGSTNDNTYFGYSTPWGYFDFNRFHCHFSPRDWQRLINNNWGFRPKKLNFKLFNIQVKEVTTNDGTTTIANNLTSTVQVFTDSEYQLPYVLGSAHQGCLPPFPADVFMIPQYGYLTLNNGSQAVGRSSFYCLEYFPSQMLRTGNNFQFSYTFEDVPFHSSYAHSQSLDRLMNPLIDQYLYYLSRTQTTSGTAGNRTLQFSQAGPSSMANQAKNWLPGPCYRQQRVSKTTNQNNNSNFAWTGATKYHLNGRDSLVNPGPAMATHKDDEDKFFPMSGVLIFGKQGAGNSNVDLDNVMITNEEEIKTTNPVATEEYGTVATNLQSANTAPATGTVNSQGALPGMVWQDRDVYLQGPIWAKIPHTDGHFHPSPLMGGFGLKHPPPQILIKNTPVPANPPTTFSPAKFASFITQYSTGQVSVEIEWELQKENSKRWNPEIQYTSNYNKSTNVDFAVDTNGVYSEPRPIGTRYLTRNL

SEQ ID NO: 106 - protein, 736 aa, Adeno-associated virus
MAADGYLPDWLEDNLSEGIREWWDLKPGAPKPKANQQKQDDGRGLVLPGYKYLGPFNGLDKGEPVNAADAAALEHDKAYDQQLKAGDNPYLRYNHADAEFQERLQEDTSFGGNLGRAVFQAKKRVLEPLGLVEEGAKTAPGKKRPVEQSPQEPDSSSGIGKKGQQPAKKRLNFGQTGDSESVPDPQPLGEPPAAPSGVGSNTMAAGGGAPMADNNEGADGVGNASGNWHCDSTWLGDRVITTSTRTWALPTYNNHLYKQISSQSGGSTNDNTYFGYSTPWGYFDFNRFHCHFSPRDWQRLINNNWGFRPKKLNFKLFNIQVKEVTTNDGTTTIANNLTSTVQVFTDSEYQLPYVLGSAHQGCLPPFPADVFMIPQYGYLTLNNGSQAVGRSSFYCLEYFPSQMLRTGNNFEFSYTFEDVPFHSSYAHSQSLDRLMNPLIDQYLYYLSRTQTTSGTAGNRTLQFSQAGPSSMANQAKNWLPGPCYRQQRVSKTANQNNNSNFAWTGATKYHLNGRDSLVNPGPAMATHKDDEDKFFPMSGVLIFGKQGAGNSNVDLDNVMITSEEEIKTTNPVATEQYGTVATNLQSSNTAPATGTVNSQGALPGMVWQNRDVYLQGPIWAKIPHTDGHFHPSPLMGGFGLKHPPPQILIKNTPVPANPPTTFSPAKFASFITQYSTGQVSVEIEWELQKENSKRWNPEIQYTSNYNKSTNVDFAVDTNGVYSEPRPIGTRYLTRNL

SEQ ID NO: 107 - protein, 736 aa, Adeno-associated virus
MAADGYLPDWLEDNLSEGIREWWDLKPGAPKPKANQQKQDDGRGLVLPGYKYLGPFNGLDKGEPVNAADAAALEHDKAYDQQLKAGDNPYLRYNHADAEFQERLQEDTSFGGNLGRAVFQAKKRVLEPLGLVEEGAKTAPGKKRPVEQSPQEPDSSSGIGKKGQQPAKKRLNFGQTGDSESVPDPQPLGEPPAAPSGVGSNTMASGGGAPMADNNEGADGVGNASGNWHCDSTWLGDRVITTSTRTWALPTYNNHLYKQISSQSGGSTNDNTYFGYSTPWGYFDFNRFHCHFSPRDWQRLINNNWGFRPKKLNFKLFNIQVKEVTTNDGTTTIANNLTSTVQVFTDSEYQLPYVLGSAHQGCLPPFPADVFMIPQYGYLTLNNGSQAVGRSSFYCLEYFPSQMLRTGNNFEFSYTFEDVPFHSSYAHSQSLDRLMNPLIDQYLYYLSRTQTTSGTAGNRTLQFSQAGPSSMANQAKNWLPGPCYRQQRVSKTANQNNNSNFAWTGATKYHLNGRDSLVNPGPAMATHKDDEDKFFPMSGVLIFGKQGAGNSNVDLDNVMITSEEEIKTTNPVATEEYGTVATNLQSSNTAPATGTVNSQGALPGMVWQNRDVYLQGPIWAKIPHTDGHFHPSPLMGGFGLKHPPPQILIKNTPVPANPPTTFSPAKFASFITQYSTGQVSVEIEWELQKENSKRWNPEIQYTSNYNKSTNVDFAVDTNGVYSEPRPIGTRYLTRNL

SEQ ID NO: 108 - protein, 736 aa, Adeno-associated virus
MAADGYLPDWLEDNLSEGIREWWDLKPGAPKPKANQQKQDDGRGLVLPGYKYLGPFNGLDKGEPVNAADAAALEHDKAYDQQLKAGDNPYLRYNHADAEFQERLQEDTSFGGNLGRAVFQAKKRVLEPLGLVEEGAKTAPGKKRPVEQSPQEPDSSSGIGKKGQQPAKKRLNFGQTGDSESVPDPQPLGEPPAAPSGVGSNTMASGGGAPMADNNEGADGVGNASGNWHCDSTWLGDRVITTSTRTWALPTYNNHLYKQISSQSGGSTNDNTYFGYSTPWGYFDFNRFHCHFSPRDWQRLINNNWGFRPKKLNFKLFNIQVKEVTTNDGTTTIANNLTSTVQVFTDSEYQLPYVLGSAHQGCLPPFPADVFMIPQYGYLTLNNGSQAVGRSSFYCLEYFPSQMLRTGNNFQFSYTFEDVPFHSSYAHSQSLDRLMNPLIDQYLYYLSRTQTTSGTAGNRELQFSQAGPSSMANQAKNWLPGPCYRQQRVSKTTNQNNNSNFAWTGATKYHLNGRDSLVNPGPAMATHKDDEDKFFPMSGVLIFGKQGAGNSNVDLDNVMITNEEEIKTTNPVATEQYGTVATNLQSANTAPATGTVNSQGALPGMVWQDRDVYLQGPIWAKIPHTDGHFHPSPLMGGFGLKHPPPQILIKNTPVPANPPTTFSPAKFASFITQYSTGQVSVEIEWELQKENSKRWNPEIQYTSNYNKSTNVDFAVDTNGVYSEPRPIGTRYLTRNL

SEQ ID NO: 109 - protein, 736 aa, Adeno-associated virus
MAADGYLPDWLEDNLSEGIREWWDLKPGAPKPKANQQKQDDGRGLVLPGYKYLGPFNGLDKGEPVNAADAAALEHDKAYDQQLKAGDNPYLRYNHADAEFQERLQEDTSFGGNLGRAVFQAKKRVLEPLGLVEEGAKTAPGKKRPVEQSPQEPDSSSGIGKKGQQPAKKRLNFGQTGDSESVPDPQPLGEPPAAPSGVGSNTMAAGGGAPMADNNEGADGVGNASGNWHCDSTWLGDRVITTSTRTWALPTYNNHLYKQISSQSGASTNDNTYFGYSTPWGYFDFNRFHCHFSPRDWQRLINNNWGFRPKRLNFKLFNIQVKEVTTNDGTTTIANNLTSTVQVFTDSEYQLPYVLGSAHQGCLPPFPADVFMIPQYGYLTLNNGSQAVGRSSFYCLEYFPSQMLRTGNNFEFSYTFEDVPFHSSYAHSQSLDRLMNPLIDQYLYYLSRTQTTSGTAGNRTLQFSQAGPSSMANQAKNWLPGPCYRQQRVSKTANQNNNSNFAWTGATKYHLNGRDSLVNPGPAMATHKDDEDKFFPMSGVLIFGKQGAGNSNVDLDNVMITSEEEIKTTNPVATEQYGTVATNLQSSNTAPATGTVNSQGALPGMVWQNRDVYLQGPIWAKIPHTDGHFHPSPLMGGFGLKHPPPQILIKNTPVPANPPTTFSPAKFASFITQYSTGQVSVEIEWELQKENSKRWNPEIQYTSNYNKSTNVDFAVDTNGVYSEPRPIGTRYLTRNL

SEQ ID NO: 110 - protein, 736 aa, Adeno-associated virus
MAADGYLPDWLEDNLSEGIREWWDLKPGAPKPKANQQKQDDGRGLVLPGYKYLGPFNGLDKGEPVNAADAAALEHDKAYDQQLKAGDNPYLRYNHADAEFQERLQEDTSFGGNLGRAVFQAKKRVLEPLGLVEEGAKTAPGKKRPVEQSPQEPDSSSGIGKTGQQPAKKRLNFGQTGDSESVPDPQPLGEPPAAPSGVGSNTMASGGGAPMADNNEGADGVGNSSGNWHCDSTWLGDRVITTSTRTWALPTYNNHLYKQISNGTSGGSTNDNTYFGYSTPWGYFDFNRFHCHFSPRDWQRLINNNWGFRPKRLNFKLFNIQVKEVTTNEGTKTIANNLTSTVQVFTDSEYQLPYVLGSAHQGCLPPFPADVFMIPQYGYLTLNNGSQAVGRSSFYCLEYFPSQMLRTGNNFQFSYTFEDVPFHSSYAHSQSLDRLMNPLIDQYLYYLSRTQTTGTAGTQTLQFSQAGPSSMANQARNWVPGPCYRQQRVSTTTNQNNNSNFAWTGATKYHLNGRDSLMNPGVAMASHKDDEDRFFPSSGVLIFGKQGAGNDNVDYSQVMITNEEEIKTTNPVATEEYGAVATNNQSANTQAQTGLVHNQGVLPGMVWQNRDVYLQGPIWAKIPHTDGNFHPSPLMGGFGLKHPPPQILIKNTPVPADPPTTFNQAKLNSFITQYSTGQVSVEIEWELQKENSKRWNPEIQYTSNYYKSTNVDFAVNTEGVYSEPRPIGTRYLTRNL

SEQ ID NO: 111 - protein, 738 aa, Adeno-associated virus
MAADGYLPDWLEDNLSEGIREWWDLKPGAPKPKANQQKQDDGRGLVLPGYKYLGPFNGLDKGEPVNAADAAALEHDKAYDQQLKAGDNPYLRYNHADAEFQERLQEDTSFGGNLGRAVFQAKKRVLEPLGLVEEGAKTAPGKKRPVEQSPQREPDSSTGIGKSGQQPAKKRLNFGQTGDSESVPDPQPLGEPPAAPSGVGSNTMASGGGAPMADNNEGADGVGNSSGNWHCDSTWLGDRVITTSTRTWALPTYNNHLYKQISNGTSGGSTNDNTYFGYSTPWGYFDFNRFHCHFSPRDWQRLINNNWGFRPKRLNFKLFNIQVKEVTTNEGTKTIANNLTSTVQVFTDSEYQLPYVLGSAHQGCLPPFPADVFMIPQYGYLTLNNGSQAVGRSSFYCLEYFPSQMLRTGNNFQFSYTFEDVPFHSSYAHSQSLDRLMNPLIDQYLYYLSRTQTTGGTAGTQTLQFSQAGPSSMANQARNWVPGPCYRQQRVSTTTNQNNNSNFAWTGATKYHLNGRDSLMNPGVAMASHKDDEDRFFPSSGVLIFGKQGAGNDNVDYSNVMITSEEEIKTTNPVATEEYGVVATNHQSANTQAQTGTVQNQGILPGMVWQNRDVYLQGPIWAKIPHTDGNFHPSPLMGGFGLKHPPPQILIKNTPVPADPPTTFNQAKLNSFITQYSTGQVSVEIEWELQKENSKRWNPEIQYTSNYYKSTNVDFAVNTEGVYSEPRPIGTRYLTRNL

SEQ ID NO: 112 - protein, 735 aa, Adeno-associated virus
  MOD_RES (263)..(263): Q, A, E, T, or G
  MOD_RES (264)..(264): G, T, A, V, or S
  MOD_RES (265)..(265): G, T, A, or V
  MOD_RES (266)..(266): A, G, or D
  MOD_RES (267)..(267): S or T
  MOD_RES (271)..(271): H, T, or A
  MOD_RES (382)..(382): N or D
  MOD_RES (383)..(383): G or T
  MOD_RES (384)..(384): S or E
  MOD_RES (385)..(385): Q or N
  MOD_RES (446)..(446): S, N, A, V, or R
  MOD_RES (471)..(471): R, S, or A
  MOD_RES (502)..(502): W or F
  MOD_RES (503)..(503): T, P, or A
  MOD_RES (528)..(528): D, E, or L
  MOD_RES (529)..(529): D, G, or Q
  MOD_RES (589)..(589): Q, D, A, or G
  MOD_RES (706)..(706): K or D
  MOD_RES (708)..(708): V, A, T, N, or Q
MAADGYLPDWLEDTLSEGIRQWWKLKPGPPPPKPAERHKDDSRGLVLPGYKYLGPFNGLDKGEPVNEADAAALEHDKAYDRQLDSGDNPYLKYNHADAEFQERLKEDTSFGGNLGRAVFQAKKRVLEPLGLVEEPVKTAPGKKRPVEHSPVEPDSSSGTGKAGQQPARKRLNFGQTGDADSVPDPQPLGQPPAAPSGLGTNTMATGSGAPMADNNEGADGVGNSSGNWHCDSTWMGDRVITTSTRTWALPTYNNHLYKQISSXXXXXNDNXYFGYSTPWGYFDFNRFHCHFSPRDWQRLINNNWGFRPKRLNFKLFNIQVKEVTQNDGTTTIANNLTSTVQVFTDSEYQLPYVLGSAHQGCLPPFPADVFMVPQYGYLTLNXXXXAVGRSSFYCLEYFPSQMLRTGNNFTFSYTFEDVPFHSSYAHSQSLDRLMNPLIDQYLYYLXRTNTPSGTTTQSRLQFSQAGASDIXDQSRNWLPGPCYRQQRVSKTSADNNNSEYSXXGATKYHLNGRDSLVNPGPAMASHKXXEEKFFPQSGVLIFGKQGSEKTNVDIEKVMITDEEEIRTTNPVATEQYGSVSTNLQRGNRXAATADVNTQGVLPGMVWQDRDVYLQGPIWAKIPHTDGHFHPSPLMGGFGLKHPPPQILIKNTPVPANPSTTFSAAKFASFITQYSTGQVSVEIEWELQKENSKRWNPEIQYTSNYNXSXNVDFTVDTNGVYSEPRPIGTRYLTRNL

SEQ ID NO: 113 - protein, 734 aa, Adeno-associated virus
  MOD_RES (262)..(262): Q, A, E, T, or G
  MOD_RES (263)..(263): G, T, A, V, or S
  MOD_RES (264)..(264): G, T, A, or V
  MOD_RES (265)..(265): A, G, or D
  MOD_RES (266)..(266): S or T
  MOD_RES (270)..(270): H, T, or A
  MOD_RES (381)..(381): N or D
  MOD_RES (382)..(382): G or T
  MOD_RES (383)..(383): S or E
  MOD_RES (384)..(384): Q or N
  MOD_RES (445)..(445): S, N, A, V, or R
  MOD_RES (470)..(470): R, S, or A
  MOD_RES (501)..(501): W or F
  MOD_RES (502)..(502): T, P, or A
  MOD_RES (527)..(527): D, E, or L
  MOD_RES (528)..(528): D, G, or Q
  MOD_RES (588)..(588): Q, D, A, or G
  MOD_RES (705)..(705): K or D
  MOD_RES (707)..(707): V, A, T, N, or Q
AADGYLPDWLEDNLSEGIREWWDLKPGAPKPKANQQKQDDGRGLVLPGYKYLGPFNGLDKGEPVNAADAAALEHDKAYDQQLKAGDNPYLRYNHADAEFQERLQEDTSFGGNLGRAVFQAKKRVLEPLGLVEEGAKTAPGKKRPVEQSPQEPDSSSGIGKTGQQPAKKRLNFGQTGDSESVPDPQPLGEPPATPAAVGPTTMASGGGAPMADNNEGADGVGNASGNWHCDSTWLGDRVITTSTRTWALPTYNNHLYKQISSXXXXXNDNXYFGYSTPWGYFDFNRFHCHFSPRDWQRLINNNWGFRPKRLNFKLFNIQVKEVTTNDGVTTIANNLTSTVQVFSDSEYQLPYVLGSAHQGCLPPFPADVFMIPQYGYLTLNXXXXAVGRSSFYCLEYFPSQMLRTGNNFTFSYTFEEVPFHSSYAHSQSLDRLMNPLIDQYLYYLXRTQNQSGSAQNKDLLFSRGSPAGMXVQPKNWLPGPCYRQQRVSKTKTDNNNSNFTXXGASKYNLNGRESIINPGTAMASHKXXEDKFFPMSGVMIFGKESAGASNTALDNVMITDEEEIKATNPVATERFGTVAVNFQSSSTXPATGDVHAMGALPGMVWQDRDVYLQGPIWAKIPHTDGHFHPSPLMGGFGLKNPPPQILIKNTPVPANPPAEFSATKFASFITQYSTGQVSVEIEWELQKENSKRWNPEVQYTSNYAXSXNVDFTVDNNGLYTEPRPIGTRYLTRPL

SEQ ID NO: 114 - protein, 735 aa, Adeno-associated virus
  MOD_RES (263)..(263): Q, A, E, T, or G
  MOD_RES (264)..(264): G, T, A, V, or S
  MOD_RES (265)..(265): G, T, A, or V
  MOD_RES (266)..(266): A, G, or D
  MOD_RES (267)..(267): S or T
  MOD_RES (271)..(271): H, T, or A
  MOD_RES (382)..(382): N or D
  MOD_RES (383)..(383): G or T
  MOD_RES (384)..(384): S or E
  MOD_RES (385)..(385): Q or N
  MOD_RES (446)..(446): S, N, A, V, or R
  MOD_RES (471)..(471): R, S, or A
  MOD_RES (502)..(502): W or F
  MOD_RES (503)..(503): T, P, or A
  MOD_RES (528)..(528): D, E, or L
  MOD_RES (529)..(529): D, G, or Q
  MOD_RES (589)..(589): Q, D, A, or G
  MOD_RES (706)..(706): K or D
  MOD_RES (708)..(708): V, A, T, N, or Q
MAADGYLPDWLEDNLSEGIREWWDLKPGAPKPKANQQKQDDGRGLVLPGYKYLGPFNGLDKGEPVNAADAAALEHDKAYDQQLKAGDNPYLRYNHADAEFQERLQEDTSFGGNLGRAVFQAKKRVLEPFGLVEEGAKTAPGKKRPVEQSPQEPDSSSGIGKTGQQPAKKRLNFGQTGDSESVPDPQPLGEPPATPAAVGPTTMASGGGAPMADNNEGADGVGNASGNWHCDSTWLGDRVITTSTRTWALPTYNNHLYKQISSXXXXXNDNXYFGYSTPWGYFDFNRFHCHFSPRDWQRLINNNWGFRPKRLNFKLFNIQVKEVTTNDGVTTIANNLTSTVQVFSDSEYQLPYVLGSAHQGCLPPFPADVFMIPQYGYLTLNXXXXAVGRSSFYCLEYFPSQMLRTGNNFTFSYTFEDVPFHSSYAHSQSLDRLMNPLIDQYLYYLXRTQNQSGSAQNKDLLFSRGSPAGMXVQPKNWLPGPCYRQQRVSKTKTDNNNSNFTXXGASKYNLNGRESIINPGTAMASHKXXKDKFFPMSGVMIFGKESAGASNTALDNVMITDEEEIKATNPVATERFGTVAVNLQSSSTXPATGDVHVMGALPGMVWQDRDVYLQGPIWAKIPHTDGHFHPSPLMGGFGLKHPPPQILIKNTPVPANPPAEFSATKFASFITQYSTGQVSVEIEWELQKENSKRWNPEVQYTSNYAXSXNVDFTVDNNGLYTEPRPIGTRYLTRPL

SEQ ID NO: 115 - protein, 736 aa, Adeno-associated virus
  MOD_RES (263)..(263): Q, A, E, T, or G
  MOD_RES (264)..(264): G, T, A, V, or S
  MOD_RES (265)..(265): G, T, A, or V
  MOD_RES (266)..(266): A, G, or D
  MOD_RES (267)..(267): S or T
  MOD_RES (271)..(271): H, T, or A
  MOD_RES (382)..(382): N or D
  MOD_RES (383)..(383): G or T
  MOD_RES (384)..(384): S or E
  MOD_RES (385)..(385): Q or N
  MOD_RES (446)..(446): S, N, A, V, or R
  MOD_RES (472)..(472): R, S, or A
  MOD_RES (503)..(503): W or F
  MOD_RES (504)..(504): T, P, or A
  MOD_RES (529)..(529): D, E, or L
  MOD_RES (530)..(530): D, G, or Q
  MOD_RES (590)..(590): Q, D, A, or G
  MOD_RES (707)..(707): K or D
  MOD_RES (709)..(709): V, A, T, N, or Q
MAADGYLPDWLEDNLSEGIREWWALKPGVPQPKANQQHQDNRRGLVLPGYKYLGPGNGLDKGEPVNEADAAALEHDKAYDQQLKAGDNPYLKYNHADAEFQERLQEDTSFGGNLGRAVFQAKKRILEPLGLVEEAAKTAPGKKGAVDQSPQEPDSSSGVGKSGKQPARKRLNFGQTGDSESVPDPQPLGEPPAAPTSLGSNTMASGGGAPMADNNEGADGVGNSSGNWHCDSQWLGDRVITTSTRTWALPTYNNHLYKQISSXXXXXNDNXYFGYSTPWGYFDFNRFHCHFSPRDWQRLINNNWGFRPKKLSFKLFNIQVRGVTQNDGTTTIANNLTSTVQVFTDSEYQLPYVLGSAHQGCLPPFPADVFMVPQYGYLTLNXXXXAVGRSSFYCLEYFPSQMLRTGNNFQFSYTFEDVPFHSSYAHSQSLDRLMNPLIDQYLYYLXRTQGTTSGTTNQSRLLFSQAGPQSMXLQARNWLPGPCYRQQRLSKTANDNNNSNFPXXAASKYHLNGRDSLVNPGPAMASHKXXEEKFFPMHGNLIFGKEGTTASNAELDNVMITDEEEIRTTNPVATEQYGTVANNLQSSNTXPTTGTVNHQGALPGMVWQDRDVYLQGPIWAKIPHTDGHFHPSPLMGGFGLKHPPPQIMIKNTPVPANPPTTFSPAKFASFITQYSTGQVSVEIEWELQKENSKRWNPEIQYTSNYNXSXNVDFTVDTNGVYSEPRPIGTRYLTRNL

SEQ ID NO: 116 - protein, 736 aa, Adeno-associated virus
  MOD_RES (263)..(263): Q, A, E, T, or G
  MOD_RES (264)..(264): G, T, A, V, or S
  MOD_RES (265)..(265): G, T, A, or V
  MOD_RES (266)..(266): A, G, or D
  MOD_RES (267)..(267): S or T
  MOD_RES (271)..(271): H, T, or A
  MOD_RES (382)..(382): N or D
  MOD_RES (383)..(383): G or T
  MOD_RES (384)..(384): S or E
  MOD_RES (385)..(385): Q or N
  MOD_RES (446)..(446): S, N, A, V, or R
  MOD_RES (472)..(472): R, S, or A
  MOD_RES (503)..(503): W or F
  MOD_RES (504)..(504): T, P, or A
  MOD_RES (529)..(529): D, E, or L
  MOD_RES (530)..(530): D, G, or Q
  MOD_RES (590)..(590): Q, D, A, or G
  MOD_RES (707)..(707): K or D
  MOD_RES (709)..(709): V, A, T, N, or Q
MAADGYLPDWLEDNLSEGIREWWALQPGAPKPKANQQHQDNARGLVLPGYKYLGPGNGLDKGEPVNAADAAALEHDKAYDQQLKAGDNPYLKYNHADAEFQERLKEDTSFGGNLGRAVFQAKKRLLEPLGLVEEAAKTAPGKKRPVDQSPQEPDSSSGVGKSGKQPARKRLNFGQTGDSESVPDPQPLGEPPAAPTSLGSNTMASGGGAPMADNNEGADGVGNSSGNWHCDSQWLGDRVITTSTRTWALPTYNNHLYKQISSXXXXXNDNXYFGYSTPWGYFDFNRFHCHFSPRDWQRLINNNWGFRPKKLSFKLFNIQVKEVTQNDGTTTIANNLTSTVQVFTDSEYQLPYVLGSAHQGCLPPFPADVFMVPQYGYLTLNXXXXAVGRSSFYCLEYFPSQMLRTGNNFQFSYTFEDVPFHSSYAHSQSLDRLMNPLIDQYLYYLXRTQGTTSGTTNQSRLLFSQAGPQSMXLQARNWLPGPCYRQQRLSKTANDNNNSNFPXXAASKYHLNGRDSLVNPGPAMASHKXXEEKFFPMHGNLIFGKEGTTASNAELDNVMITDEEEIRTTNPVATEQYGTVANNLQSSNTXPTTRTVNDQGALPGMVWQDRDVYLQGPIWAKIPHTDGHFHPSPLMGGFGLKHPPPQIMIKNTPVPANPPTTFSPAKFASFITQYSTGQVSVEIEWELQKENSKRWNPEIQYTSNYNXSXNVDFTVDTNGVYSEPRPIGTRYLTRPL

SEQ ID NO: 117 - protein, 736 aa, Adeno-associated virus
  MOD_RES (264)..(264): Q, A, E, T, or G
  MOD_RES (265)..(265): G, T, A, V, or S
  MOD_RES (266)..(266): G, T, A, or V
  MOD_RES (267)..(267): A, G, or D
  MOD_RES (268)..(268): S or T
  MOD_RES (272)..(272): H, T, or A
  MOD_RES (383)..(383): N or D
  MOD_RES (384)..(384): G or T
  MOD_RES (385)..(385): S or E
  MOD_RES (386)..(386): Q or N
  MOD_RES (447)..(447): S, N, A, V, or R
  MOD_RES (473)..(473): R, S, or A
  MOD_RES (504)..(504): W or F
  MOD_RES (505)..(505): T, P, or A
  MOD_RES (530)..(530): D, E, or L
  MOD_RES (531)..(531): D, G, or Q
  MOD_RES (590)..(590): Q, D, A, or G
  MOD_RES (707)..(707): K or D
  MOD_RES (709)..(709): V, A, T, N, or Q
MAADGYLPDWLEDNLSEGIREWWDLKPGAPKPKANQQKQDNGRGLVLPGYKYLGPFNGLDKGEPVNAADAAALEHDKAYDQQLKAGDNPYLRYNHADAEFQERLQEDTSFGGNLGRAVFQAKKRVLEPLGLVEEGAKTAPAKKRPVEPSPQRSPDSSTGIGKKGQQPARKRLNFGQTGDSESVPDPQPLGEPPAAPSSVGSGTVAAGGGAPMADNNEGADGVGNASGNWHCDSTWLGDRVITTSTRTWALPTYNNHLYKQISSXXXXXNDNXYFGYSTPWGYFDFNRFHCHFSPRDWQRLINNNWGFRPKKLRFKLFNIQVKEVTTNDGVTTIANNLTSTIQVFSDSEYQLPYVLGSAHQGCLPPFPADVFMIPQYGYLTLNXXXXSVGRSSFYCLEYFPSQMLRTGNNFEFSYSFEDVPFHSSYAHSQSLDRLMNPLIDQYLYYLXRTQSNPGGTAGNRELQFYQGGPSTMXEQAKNWLPGPCFRQQRVSKTLDQNNNSNFAXXGATKYHLNGRNSLVNPGVAMATHKXXEDRFFPSSGVLIFGKTGATNKTTLENVLMTNEEEIRPTNPVATEEYGIVSSNLQAANTXAQTQVVNNQGALPGMVWQNRDVYLQGPIWAKIPHTDGNFHPSPLMGGFGLKHPPPQILIKNTPVPANPPEVFTPAKFASFITQYSTGQVSVEIEWELQKENSKRWNPEIQYTSNFEXQXGVDFAVDSQGVYSEPRPIGTRYLTRNL

SEQ ID NO: 118 - protein, 735 aa, Adeno-associated virus
  MOD_RES (263)..(263): Q, A, E, T, or G
  MOD_RES (264)..(264): G, T, A, V, or S
  MOD_RES (265)..(265): G, T, A, or V
  MOD_RES (266)..(266): A, G, or D
  MOD_RES (267)..(267): S or T
  MOD_RES (271)..(271): H, T, or A
  MOD_RES (382)..(382): N or D
  MOD_RES (383)..(383): G or T
  MOD_RES (384)..(384): S or E
  MOD_RES (385)..(385): Q or N
  MOD_RES (446)..(446): S, N, A, V, or R
  MOD_RES (471)..(471): R, S, or A
  MOD_RES (502)..(502): W or F
  MOD_RES (503)..(503): T, P, or A
  MOD_RES (528)..(528): D, E, or L
  MOD_RES (529)..(529): D, G, or Q
  MOD_RES (589)..(589): Q, D, A, or G
  MOD_RES (706)..(706): K or D
  MOD_RES (708)..(708): V, A, T, N, or Q
AADGYLPDWLEDNLSEGIREWWALKPGAPKPKANQQKQDDGRGLVLPGYKYLGPFNGLDKGEPVNAADAAALEHDKAYDQQLQAGDNPYLRYNHADAEFQERLQEDTSFGGNLGRAVFQAKKRVLEPLGLVEEGAKTAPGKKRPVEPSPQRSPDSSTGIGKKGQQPARKRLNFGQTGDSESVPDPQPLGEPPAAPSGVGPNTMAAGGGAPMADNNEGADGVGSSSGNWHCDSTWLGDRVITTSTRTWALPTYNNHLYKQISNXXXXXNDNXYFGYSTPWGYFDFNRFHCHFSPRDWQRLINNNWGFRPKRLSFKLFNIQVKEVTQNEGTKTIANNLTSTIQVFTDSEYQLPYVLGSAHQGCLPPFPADVFMIPQYGYLTLNXXXXAVGRSSFYCLEYFPSQMLRTGNNFQFTYTFEDVPFHSSYAHSQSLDRLMNPLIDQYLYYLXRTQTTGGTANTQTLGFSQGGPNTMXNQAKNWLPGPCYRQQRVSTTTGQNNNSNFAXXAGTKYHLNGRNSLANPGIAMATHKXXEERFFPSNGILIFGKQNAARDNADYSDVMLTSEEEIKTTNPVATEEYGIVADNLQQQNTXPQIGTVNSQGALPGMVWQNRDVYLQGPIWAKIPHTDGNFHPSPLMGGFGLKHPPPQILIKNTPVPADPPTTFNQSKLNSFITQYSTGQVSVEIEWELQKENSKRWNPEIQYTSNYYXSXSVDFAVNTEGVYSEPRPIGTRYLTRNL

SEQ ID NO: 119 - protein, 736 aa, Adeno-associated virus
  MOD_RES (264)..(264): Q, A, E, T, or G
  MOD_RES (265)..(265): G, T, A, V, or S
  MOD_RES (266)..(266): G, T, A, or V
  MOD_RES (267)..(267): A, G, or D
  MOD_RES (268)..(268): S or T
  MOD_RES (272)..(272): H, T, or A
  MOD_RES (383)..(383): N or D
  MOD_RES (384)..(384): G or T
  MOD_RES (385)..(385): S or E
  MOD_RES (386)..(386): Q or N
  MOD_RES (447)..(447): S, N, A, V, or R
  MOD_RES (472)..(472): R, S, or A
  MOD_RES (503)..(503): W or F
  MOD_RES (504)..(504): T, P, or A
  MOD_RES (529)..(529): D, E, or L
  MOD_RES (530)..(530): D, G, or Q
  MOD_RES (590)..(590): Q, D, A, or G
  MOD_RES (707)..(707): K or D
  MOD_RES (709)..(709): V, A, T, N, or Q
MAADGYLPDWLEDNLSEGIREWWDLKPGAPKPKANQQKQDDGRGLVLPGYKYLGPFNGLDKGEPVNAADAAALEHDKAYDQQLKAGDNPYLRYNHADAEFQERLQEDTSFGGNLGRAVFQAKKRVLEPLGLVEEAAKTAPGKKRPVEPSPQRSPDSSTGIGKKGQQPAKKRLNFGQTGDSESVPDPQPIGEPPAGPSGLGSGTMAAGGGAPMADNNEGADGVGSSSGNWHCDSTWLGDRVITTSTRTWALPTYNNHLYKQISNXXXXXNDNXYFGYSTPWGYFDFNRFHCHFSPRDWQRLINNNWGFRPKRLSFKLFNIQVKEVTQNEGTKTIANNLTSTIQVFTDSEYQLPYVLGSAHQGCLPPFPADVFMIPQYGYLTLNXXXXAVGRSSFYCLEYFPSQMLRTGNNFEFSYTFEDVPFHSSYAHSQSLDRLMNPLIDQYLYYLXRTQSTGGTQGTQQLLFSQAGPANMXAQAKNWLPGPCYRQQRVSTTLSQNNNSNFAXXGATKYHLNGRDSLVNPGVAMATHKXXEERFFPSSGVLMFGKQGAGRDNVDYSSVMLTSEEEIKTTNPVATEQYGVVADNLQQTNTXPIVGNVNSQGALPGMVWQNRDVYLQGPIWAKIPHTDGNFHPSPLMGGFGLKHPPPQILIKNTPVPADPPTTFSQAKLASFITQYSTGQVSVEIEWELQKENSKRWNPEIQYTSNYYXSXNVDFAVNTEGTYSEPRPIGTRYLTRNL

SEQ ID NO: 120 - protein, 736 aa, Adeno-associated virus
  MOD_RES (264)..(264): Q, A, E, T, or G
  MOD_RES (265)..(265): G, T, A, V, or S
  MOD_RES (266)..(266): G, T, A, or V
  MOD_RES (267)..(267): A, G, or D
  MOD_RES (268)..(268): S or T
  MOD_RES (272)..(272): H, T, or A
  MOD_RES (383)..(383): N or D
  MOD_RES (384)..(384): G or T
  MOD_RES (385)..(385): S or E
  MOD_RES (386)..(386): Q or N
  MOD_RES (447)..(447): S, N, A, V, or R
  MOD_RES (472)..(472): R, S, or A
  MOD_RES (503)..(503): W or F
  MOD_RES (504)..(504): T, P, or A
  MOD_RES (529)..(529): D, E, or L
  MOD_RES (530)..(530): D, G, or Q
  MOD_RES (590)..(590): Q, D, A, or G
  MOD_RES (707)..(707): K or D
  MOD_RES (709)..(709): V, A, T, N, or Q
MAADGYLPDWLEDNLSEGIREWWDLKPGAPKPKANQQKQDDGRGLVLPGYKYLGPFNGLDKGEPVNAADAAALEHDKAYDQQLKAGDNPYLRYNHADAEFQERLQEDTSFGGNLGRAVFQAKKRVLEPLGLVEEGAKTAPGKKRPVEPSPQRSPDSSTGIGKKGQQPAKKRLNFGQTGDSESVPDPQPIGEPPAGPSGLGSGTMAAGGGAPMADNNEGADGVGSSSGNWHCDSTWLGDRVITTSTRTWALPTYNNHLYKQISNXXXXXNDNXYFGYSTPWGYFDFNRFHCHFSPRDWQRLINNNWGFRPKRLNFKLFNIQVKEVTQNEGTKTIANNLTSTIQVFTDSEYQLPYVLGSAHQGCLPPFPADVFMIPQYGYLTLNXXXXAVGRSSFYCLEYFPSQMLRTGNNFEFSYQFEDVPFHSSYAHSQSLDRLMNPLIDQYLYYLXRTQSTGGTAGTQQLLFSQAGPNNMXAQAKNWLPGPCYRQQRVSTTLSQNNNSNFAXXGATKYHLNGRDSLVNPGVAMATHKXXEERFFPSSGVLMFGKQGAGKDNVDYSSVMLTSEEEIKTTNPVATEQYGVVADNLQQQNAXPIVGAVNSQGALPGMVWQNRDVYLQGPIWAKIPHTDGNFHPSPLMGGFGLKHPPPQILIKNTPVPADPPTTFSQAKLASFITQYSTGQVSVEIEWELQKENSKRWNPEIQYTSNYYXSXNVDFAVNTDGTYSEPRPIGTRYLTRNL

SEQ ID NO: 121 - protein, 734 aa, Adeno-associated virus
  MOD_RES (263)..(263): Q, A, E, T, or G
  MOD_RES (264)..(264): G, T, A, V, or S
  MOD_RES (265)..(265): G, T, A, or V
  MOD_RES (266)..(266): A, G, or D
  MOD_RES (267)..(267): S or T
  MOD_RES (271)..(271): H, T, or A
  MOD_RES (382)..(382): N or D
  MOD_RES (383)..(383): G or T
  MOD_RES (384)..(384): S or E
  MOD_RES (385)..(385): Q or N
  MOD_RES (446)..(446): S, N, A, V, or R
  MOD_RES (470)..(470): R, S, or A
  MOD_RES (501)..(501): W or F
  MOD_RES (502)..(502): T, P, or A
  MOD_RES (527)..(527): D, E, or L
  MOD_RES (528)..(528): D, G, or Q
  MOD_RES (588)..(588): Q, D, A, or G
  MOD_RES (705)..(705): K or D
  MOD_RES (707)..(707): V, A, T, N, or Q
MAADGYLPDWLEDNLSEGIREWWALKPGAPQPKANQQHQDNARGLVLPGYKYLGPGNGLDKGEPVNAADAAALEHDKAYDQQLKAGDNPYLKYNHADAEFQERLKEDTSFGGNLGRAVFQAKKRLLEPLGLVEEAAKTAPGKKRPVEQSPQEPDSSAGIGKSGAQPAKKRLNFGQTGDTESVPDPQPIGEPPAAPSGVGSLTMASGGGAPVADNNEGADGVGSSSGNWHCDSQWLGDRVITTSTRTWALPTYNNHLYKQISNXXXXXNDNXYFGYSTPWGYFDFNRFHCHFSPRDWQRLINNNWGFRPKRLNFKLFNIQVKEVTDNNGVKTIANNLTSTVQVFTDSDYQLPYVLGSAHEGCLPPFPADVFMIPQYGYLTLNXXXXAVGRSSFYCLEYFPSQMLRTGNNFQFSYEFENVPFHSSYAHSQSLDRLMNPLIDQYLYYLXKTINGSGQNQQTLKFSVAGPSNMXVQGRNYIPGPSYRQQRVSTTVTQNNNSEFAXXGASSWALNGRNSLMNPGPAMASHKXXEDRFFPLSGSLIFGKQGTGRDNVDADKVMITNEEEIKTTNPVATESYGQVATNHQSAQAXAQTGWVQNQGILPGMVWQDRDVYLQGPIWAKIPHTDGNFHPSPLMGGFGMKHPPPQILIKNTPVPADPPTAFNKDKLNSFITQYSTGQVSVEIEWELQKENSKRWNPEIQYTSNYYXSXNVEFAVNTEGVYSEPRPIGTRYLTRNL

SEQ ID NO: 122 - protein, 734 aa, Adeno-associated virus
  MOD_RES (263)..(263): Q, A, E, T, or G
  MOD_RES (264)..(264): G, T, A, V, or S
  MOD_RES (265)..(265): G, T, A, or V
  MOD_RES (266)..(266): A, G, or D
  MOD_RES (267)..(267): S or T
  MOD_RES (271)..(271): H, T, or A
  MOD_RES (382)..(382): N or D
  MOD_RES (383)..(383): G or T
  MOD_RES (384)..(384): S or E
  MOD_RES (385)..(385): Q or N
  MOD_RES (446)..(446): S, N, A, V, or R
  MOD_RES (470)..(470): R, S, or A
  MOD_RES (501)..(501): W or F
  MOD_RES (502)..(502): T, P, or A
  MOD_RES (527)..(527): D, E, or L
  MOD_RES (528)..(528): D, G, or Q
  MOD_RES (588)..(588): Q, D, A, or G
  MOD_RES (705)..(705): K or D
  MOD_RES (707)..(707): V, A, T, N, or Q
MAADGYLPDWLEDNLSEGIREWWALKPGAPQPKANQQHQDNARGLVLPGYKYLGPGNGLDKGEPVNEADAAALEHDKAYDQQLKAGDNPYLKYNHADAEFQERLKEDTSFGGNLGRAVFQAKKRLLEPLGLVEEAAKTAPGKKRPVEQSPQEPDSSVGIGKSGAQPAKKRLNFGQTGDTESVPDPQPIGEPPAAPSGVGSLTMASGGGAPVADNNEGADGVGSSSGNWHCDSQWLGDRVITTSTRTWALPTYNNHLYKQISNXXXXXNDNXYFGYSTPWGYFDFNRFHCHFSPRDWQRLINNNWGFRPKRLNFKLFNIQVKEVTDNNGVKTIANNLTSTVQVFTDSDYQLPYVLGSAHEGCLPPFPADVFMIPQYGYLTLNXXXXAVGRSSFYCLEYFPSQMLRTGNNFQFSYEFENVPFHSSYAHSQSLDRLMNPLIDQYLYYLXKTINGSGQNQQTLKFSVAGPSNMXVQGRNYIPGPSYRQQRVSTTVTQNNNSEFAXXGASSWALNGRNSLMNPGPAMASHKXXEDRFFPLSGSLIFGKQGTGRDNVDADKVMITNEEEIKTTNPVATESYGQVATNHQSAQAXAQTGWVQNQGILPGMVWQDRDVYLQGPIWAKIPHTDGNFHPSPLMGGFGMKHPPPQILIKNTPVPADPPTAFNKDKLNSFITQYSTGQVSVEIEWELQKENSKRWNPEIQYTSNYYXSXNVEFAVNTEGVYSEPRPIGTRYLTRNL

SEQ ID NO: 123 - protein, 736 aa, Adeno-associated virus
  MOD_RES (264)..(264): Q, A, E, T, or G
  MOD_RES (265)..(265): G, T, A, V, or S
  MOD_RES (266)..(266): G, T, A, or V
  MOD_RES (267)..(267): A, G, or D
  MOD_RES (268)..(268): S or T
  MOD_RES (272)..(272): H, T, or A
  MOD_RES (383)..(383): N or D
  MOD_RES (384)..(384): G or T
  MOD_RES (385)..(385): S or E
  MOD_RES (386)..(386): Q or N
  MOD_RES (447)..(447): S, N, A, V, or R
  MOD_RES (472)..(472): R, S, or A
  MOD_RES (503)..(503): W or F
  MOD_RES (504)..(504): T, P, or A
  MOD_RES (529)..(529): D, E, or L
  MOD_RES (530)..(530): D, G, or Q
  MOD_RES (590)..(590): Q, D, A, or G
  MOD_RES (707)..(707): K or D
  MOD_RES (709)..(709): V, A, T, N, or Q
MAADGYLPDWLEDNLSEGIREWWDLKPGAPKPKANQQKQDDGRGLVLPGYKYLGPFNGLDKGEPVNAADAAALEHDKAYDQQLKAGDNPYLRYNHADAEFQERLQEDTSFGGNLGRAVFQAKKRVLEPLGLVEEAAKTAPGKKRPVEPSPQRSPDSSTGIGKKGQQPAKKRLNFGQTGESESVPDPQPIGEPPAGPSGLGSGTMAAGGGAPMADNNEGADGVGSSSGNWHCDSTWLGDRVITTSTRTWALPTYNNHLYKQISNXXXXXNDNXYFGYSTPWGYFDFNRFHCHFSPRDWQRLINNNWGFRPKRLSFKLFNIQVKEVTQNEGTKTIANNLTSTIQVFTDSEYQLPYVLGSAHQGCLPPFPADVFMIPQYGYLTLNXXXXAVGRSSFYCLEYFPSQMLRTGNNFEFSYTFEDVPFHSSYAHSQSLDRLMNPLIDQYLYYLXRTQSTGGTQGTQQLLFSQAGPANMXAQAKNWLPGPCYRQQRVSTTLSQNNNSNFAXXGATKYHLNGRDSLVNPGVAMATHKXXEERFFPSSGVLMFGKQGAGRDNVDYSSVMLTSEEEIKTTNPVATEQYGVVADNLQQANTXPIVGNVNSQGALPGMVWQNRDVYLQGPIWAKIPHTDGNFHPSPLMGGFGLKHPPPQILIKNTPVPADPPTTFSQAKLASFITQYSTGQVSVEIEWELQKENSKRWNPEIQYTSNYYXSXNVDFAVNTEGTYSEPRPIGTRYLTRNL

SEQ ID NO: 124 - protein, 723 aa, Adeno-associated virus
  MOD_RES (253)..(253): Q, A, E, T, or G
  MOD_RES (254)..(254): G, T, A, V, or S
  MOD_RES (255)..(255): G, T, A, or V
  MOD_RES (256)..(256): A, G, or D
  MOD_RES (257)..(257): S or T
  MOD_RES (261)..(261): H, T, or A
  MOD_RES (374)..(374): N or D
  MOD_RES (375)..(375): G or T
  MOD_RES (376)..(376): S or E
  MOD_RES (377)..(377): Q or N
  MOD_RES (438)..(438): S, N, A, V, or R
  MOD_RES (457)..(457): R, S, or A
  MOD_RES (488)..(488): W or F
  MOD_RES (489)..(489): T, P, or A
  MOD_RES (514)..(514): D, E, or L
  MOD_RES (515)..(515): D, G, or Q
  MOD_RES (578)..(578): Q, D, A, or G
  MOD_RES (694)..(694): K or D
  MOD_RES (696)..(696): V, A, T, N, or Q
MSFVDHPPDWLEEVGEGLREFLGLEAGPPKPKPNQQHQDQARGLVLPGYNYLGPGNGLDRGEPVNRADEVAREHDISYNEQLEAGDNPYLKYNHADAEFQEKLADDTSFGGNLGKAVFQAKKRVLEPFGLVEEGAKTAPTGKRIDDHFPKRKKARTEEDSKPSTSSDAEAGPSGSQQLQIPAQPASSLGADTMSAGGGGPLGDNNQGADGVGNASGDWHCDSTWMGDRVVTKSTRTWVLPSYNNHQYREIKSXXXXXNANXYFGYSTPWGYFDFNRFHSHWSPRDWQRLINNYWGFRPRSLRVKIFNIQVKEVTVQDSTTTIANNLTSTVQVFTDDDYQLPYVVGNGTEGCLPAFPPQVFTLPQYGYATLNRDXXXXPTERSSFFCLEYFPSKMLRTGNNFEFTYNFEEVPFHSSFAPSQNLFKLANPLVDQYLYRFXSTNNTGGVQFNKNLAGRYXNTYKNWFPGPMGRTQGWNLGSGVNRASVSAXXTTNRMELEGASYQVPPQPNGMTNNXXGSNTYALENTMIFNSQPANPGTTATYLEGNMLITSESETQPVNRVAYNVGGQMATNNQSSTTXPATGTYNLQEIVPGSVWMERDVYLQGPIWAKIPETGAHFHPSPAMGGFGLKHPPPMMLIKNTPVPGNITSFSDVPVSSFITQYSTGQVTVEMEWELKKENSKRWNPEIQYTNNYNXPXFVDFAPDSTGEYRTTRPIGTRYLTRPL

SEQ ID NO: 125 - protein, 735 aa, Adeno-associated virus
  MOD_RES (446)..(446): R or S
  MOD_RES (471)..(471): A, R or S
  MOD_RES (708)..(708): T, V, or A
MAADGYLPDWLEDTLSEGIRQWWKLKPGPPPPKPAERHKDDSRGLVLPGYKYLGPFNGLDKGEPVNEADAAALEHDKAYDRQLDSGDNPYLKYNHADAEFQERLKEDTSFGGNLGRAVFQAKKRVLEPLGLVEEPVKTAPGKKRPVEHSPVEPDSSSGTGKAGQQPARKRLNFGQTGDADSVPDPQPLGQPPAAPSGLGTNTMATGSGAPMADNNEGADGVGNSSGNWHCDSTWMGDRVITTSTRTWALPTYNNHLYKQISSQSGASNDNHYFGYSTPWGYFDFNRFHCHFSPRDWQRLINNNWGFRPKRLNFKLFNIQVKEVTQNDGTTTIANNLTSTVQVFTDSEYQLPYVLGSAHQGCLPPFPADVFMVPQYGYLTLNNGSQAVGRSSFYCLEYFPSQMLRTGNNFTFSYTFEDVPFHSSYAHSQSLDRLMNPLIDQYLYYLXRTNTPSGTTTQSRLQFSQAGASDIXDQSRNWLPGPCYRQQRVSKTSADNNNSEYSWTGATKYHLNGRDSLVNPGPAMASHKDDEEKFFPQSGVLIFGKQGSEKTNVDIEKVMITDEEEIRTTNPVATEQYGSVSTNLQRGNRQAATADVNTQGVLPGMVWQDRDVYLQGPIWAKIPHTDGHFHPSPLMGGFGLKHPPPQILIKNTPVPANPSTTFSAAKFASFITQYSTGQVSVEIEWELQKENSKRWNPEIQYTSNYNKSXNVDFTVDTNGVYSEPRPIGTRYLTRNL

SEQ ID NO: 126 - protein, 735 aa, Adeno-associated virus
  MOD_RES (446)..(446): R or S
  MOD_RES (471)..(471): A, R or S
  MOD_RES (708)..(708): T, V, or A
AADGYLPDWLEDNLSEGIREWWDLKPGAPKPKANQQKQDDGRGLVLPGYKYLGPFNGLDKGEPVNAADAAALEHDKAYDQQLKAGDNPYLRYNHADAEFQERLQEDTSFGGNLGRAVFQAKKRVLEPLGLVEEGAKTAPGKKRPVEQSPQEPDSSSGIGKTGQQPAKKRLNFGQTGDSESVPDPQPLGEPPATPAAVGPTTMASGGGAPMADNNEGADGVGNASGNWHCDSTWLGDRVITTSTRTWALPTYNNHLYKQISSASTGASNDNHYFGYSTPWGYFDFNRFHCHFSPRDWQRLINNNWGFRPKRLNFKLFNIQVKEVTTNDGVTTIANNLTSTVQVFSDSEYQLPYVLGSAHQGCLPPFPADVFMIPQYGYLTLNNGSQAVGRSSFYCLEYFPSQMLRTGNNFTFSYTFEEVPFHSSYAHSQSLDRLMNPLIDQYLYYLXRTQNQSGSAQNKDLLFSRGSPAGMXVQPKNWLPGPCYRQQRVSKTKTDNNNSNFTWTGASKYNLNGRESIINPGTAMASHKDDEDKFFPMSGVMIFGKESAGASNTALDNVMITDEEEIKATNPVATERFGTVAVNFQSSSTDPATGDVHAMGALPGMVWQDRDVYLQGPIWAKIPHTDGHFHPSPLMGGFGLKNPPPQILIKNTPVPANPPAEFSATKFASFITQYSTGQVSVEIEWELQKENSKRWNPEVQYTSNYAKSXNVDFTVDNNGLYTEPRPIGTRYLTRPL

SEQ ID NO: 127 - protein, 736 aa, Adeno-associated virus
  MOD_RES (447)..(447): R or S
  MOD_RES (472)..(472): A, R or S
  MOD_RES (709)..(709): T, V, or A
MAADGYLPDWLEDNLSEGIREWWDLKPGAPKPKANQQKQDDGRGLVLPGYKYLGPFNGLDKGEPVNAADAAALEHDKAYDQQLKAGDNPYLRYNHADAEFQERLQEDTSFGGNLGRAVFQAKKRVLEPFGLVEEGAKTAPGKKRPVEQSPQEPDSSSGIGKTGQQPAKKRLNFGQTGDSESVPDPQPLGEPPATPAAVGPTTMASGGGAPMADNNEGADGVGNASGNWHCDSTWLGDRVITTSTRTWALPTYNNHLYKQISSASTGASNDNHYFGYSTPWGYFDFNRFHCHFSPRDWQRLINNNWGFRPKRLNFKLFNIQVKEVTTNDGVTTIANNLTSTVQVFSDSEYQLPYVLGSAHQGCLPPFPADVFMIPQYGYLTLNNGSQAVGRSSFYCLEYFPSQMLRTGNNFTFSYTFEDVPFHSSYAHSQSLDRLMNPLIDQYLYYLXRTQNQSGSAQNKDLLFSRGSPAGMXVQPKNWLPGPCYRQQRVSKTKTDNNNSNFTWTGASKYNLNGRESIINPGTAMASHKDDKDKFFPMSGVMIFGKESAGASNTALDNVMITDEEEIKATNPVATERFGTVAVNLQSSSTDPATGDVHVMGALPGMVWQDRDVYLQGPIWAKIPHTDGHFHPSPLMGGFGLKHPPPQILIKNTPVPANPPAEFSATKFASFITQYSTGQVSVEIEWELQKENSKRWNPEVQYTSNYAKSXNVDFTVDNNGLYTEPRPIGTRYLTRPL

SEQ ID NO: 128 - protein, 736 aa, Adeno-associated virus
  MOD_RES (446)..(446): R or S
  MOD_RES (472)..(472): A, R or S
  MOD_RES (709)..(709): T, V, or A
MAADGYLPDWLEDNLSEGIREWWALKPGVPQPKANQQHQDNRRGLVLPGYKYLGPGNGLDKGEPVNEADAAALEHDKAYDQQLKAGDNPYLKYNHADAEFQERLQEDTSFGGNLGRAVFQAKKRILEPLGLVEEAAKTAPGKKGAVDQSPQEPDSSSGVGKSGKQPARKRLNFGQTGDSESVPDPQPLGEPPAAPTSLGSNTMASGGGAPMADNNEGADGVGNSSGNWHCDSQWLGDRVITTSTRTWALPTYNNHLYKQISSQSGASNDNHYFGYSTPWGYFDFNRFHCHFSPRDWQRLINNNWGFRPKKLSFKLFNIQVRGVTQNDGTTTIANNLTSTVQVFTDSEYQLPYVLGSAHQGCLPPFPADVFMVPQYGYLTLNNGSQAVGRSSFYCLEYFPSQMLRTGNNFQFSYTFEDVPFHSSYAHSQSLDRLMNPLIDQYLYYLXRTQGTTSGTTNQSRLLFSQAGPQSMXLQARNWLPGPCYRQQRLSKTANDNNNSNFPWTAASKYHLNGRDSLVNPGPAMASHKDDEEKFFPMHGNLIFGKEGTTASNAELDNVMITDEEEIRTTNPVATEQYGTVANNLQSSNTAPTTGTVNHQGALPGMVWQDRDVYLQGPIWAKIPHTDGHFHPSPLMGGFGLKHPPPQIMIKNTPVPANPPTTFSPAKFASFITQYSTGQVSVEIEWELQKENSKRWNPEIQYTSNYNKSXNVDFTVDTNGVYSEPRPIGTRYLTRNL

SEQ ID NO: 129 - protein, 736 aa, Adeno-associated virus
  MOD_RES (446)..(446): R or S
  MOD_RES (472)..(472): A, R or S
  MOD_RES (709)..(709): T, V, or A
MAADGYLPDWLEDNLSEGIREWWALQPGAPKPKANQQHQDNARGLVLPGYKYLGPGNGLDKGEPVNAADAAALEHDKAYDQQLKAGDNPYLKYNHADAEFQERLKEDTSFGGNLGRAVFQAKKRLLEPLGLVEEAAKTAPGKKRPVDQSPQEPDSSSGVGKSGKQPARKRLNFGQTGDSESVPDPQPLGEPPAAPTSLGSNTMASGGGAPMADNNEGADGVGNSSGNWHCDSQWLGDRVITTSTRTWALPTYNNHLYKQISSQSGASNDNHYFGYSTPWGYFDFNRFHCHFSPRDWQRLINNNWGFRPKKLSFKLFNIQVKEVTQNDGTTTIANNLTSTVQVFTDSEYQLPYVLGSAHQGCLPPFPADVFMVPQYGYLTLNNGSQAVGRSSFYCLEYFPSQMLRTGNNFQFSYTFEDVPFHSSYAHSQSLDRLMNPLIDQYLYYLXRTQGTTSGTTNQSRLLFSQAGPQSMXLQARNWLPGPCYRQQRLSKTANDNNNSNFPWTAASKYHLNGRDSLVNPGPAMASHKDDEEKFFPMHGNLIFGKEGTTASNAELDNVMITDEEEIRTTNPVATEQYGTVANNLQSSNTAPTTRTVNDQGALPGMVWQDRDVYLQGPIWAKIPHTDGHFHPSPLMGGFGLKHPPPQIMIKNTPVPANPPTTFSPAKFASFITQYSTGQVSVEIEWELQKENSKRWNPEIQYTSNYNKSXNVDFTVDTNGVYSEPRPIGTRYLTRPL

SEQ ID NO: 130 - protein, 737 aa, Adeno-associated virus
  MOD_RES (448)..(448): R or S
  MOD_RES (474)..(474): A, R or S
  MOD_RES (710)..(710): T, V, or A
MAADGYLPDWLEDNLSEGIREWWDLKPGAPKPKANQQKQDNGRGLVLPGYKYLGPFNGLDKGEPVNAADAAALEHDKAYDQQLKAGDNPYLRYNHADAEFQERLQEDTSFGGNLGRAVFQAKKRVLEPLGLVEEGAKTAPAKKRPVEPSPQRSPDSSTGIGKKGQQPARKRLNFGQTGDSESVPDPQPLGEPPAAPSSVGSGTVAAGGGAPMADNNEGADGVGNASGNWHCDSTWLGDRVITTSTRTWALPTYNNHLYKQISSETAGSTNDNTYFGYSTPWGYFDFNRFHCHFSPRDWQRLINNNWGFRPKKLRFKLFNIQVKEVTTNDGVTTIANNLTSTIQVFSDSEYQLPYVLGSAHQGCLPPFPADVFMIPQYGYLTLNNGSQSVGRSSFYCLEYFPSQMLRTGNNFEFSYSFEDVPFHSSYAHSQSLDRLMNPLIDQYLYYLXRTQSNPGGTAGNRELQFYQGGPSTMXEQAKNWLPGPCFRQQRVSKTLDQNNNSNFAWTGATKYHLNGRNSLVNPGVAMATHKDDEDRFFPSSGVLIFGKTGATNKTTLENVLMTNEEEIRPTNPVATEEYGIVSSNLQAANTAAQTQVVNNQGALPGMVWQNRDVYLQGPIWAKIPHTDGNFHPSPLMGGFGLKHPPPQILIKNTPVPANPPEVFTPAKFASFITQYSTGQVSVEIEWELQKENSKRWNPEIQYTSNFEKQXGVDFAVDSQGVYSEPRPIGTRYLTRNL

SEQ ID NO: 131 - protein, 737 aa, Adeno-associated virus
  MOD_RES (448)..(448): R or S
  MOD_RES (473)..(473): A, R or S
  MOD_RES (710)..(710): T, V, or A
AADGYLPDWLEDNLSEGIREWWALKPGAPKPKANQQKQDDGRGLVLPGYKYLGPFNGLDKGEPVNAADAAALEHDKAYDQQLQAGDNPYLRYNHADAEFQERLQEDTSFGGNLGRAVFQAKKRVLEPLGLVEEGAKTAPGKKRPVEPSPQRSPDSSTGIGKKGQQPARKRLNFGQTGDSESVPDPQPLGEPPAAPSGVGPNTMAAGGGAPMADNNEGADGVGSSSGNWHCDSTWLGDRVITTSTRTWALPTYNNHLYKQISNGTSGGATNDNTYFGYSTPWGYFDFNRFHCHFSPRDWQRLINNNWGFRPKRLSFKLFNIQVKEVTQNEGTKTIANNLTSTIQVFTDSEYQLPYVLGSAHQGCLPPFPADVFMIPQYGYLTLNNGSQAVGRSSFYCLEYFPSQMLRTGNNFQFTYTFEDVPFHSSYAHSQSLDRLMNPLIDQYLYYLXRTQTTGGTANTQTLGFSQGGPNTMXNQAKNWLPGPCYRQQRVSTTTGQNNNSNFAWTAGTKYHLNGRNSLANPGIAMATHKDDEERFFPSNGILIFGKQNAARDNADYSDVMLTSEEEIKTTNPVATEEYGIVADNLQQQNTAPQIGTVNSQGALPGMVWQNRDVYLQGPIWAKIPHTDGNFHPSPLMGGFGLKHPPPQILIKNTPVPADPPTTFNQSKLNSFITQYSTGQVSVEIEWELQKENSKRWNPEIQYTSNYYKSXSVDFAVNTEGVYSEPRPIGTRYLTRNL

SEQ ID NO: 132 - protein, 738 aa, Adeno-associated virus
  MOD_RES (449)..(449): R or S
  MOD_RES (474)..(474): A, R or S
  MOD_RES (711)..(711): T, V, or A
MAADGYLPDWLEDNLSEGIREWWDLKPGAPKPKANQQKQDDGRGLVLPGYKYLGPFNGLDKGEPVNAADAAALEHDKAYDQQLKAGDNPYLRYNHADAEFQERLQEDTSFGGNLGRAVFQAKKRVLEPLGLVEEAAKTAPGKKRPVEPSPQRSPDSSTGIGKKGQQPAKKRLNFGQTGDSESVPDPQPIGEPPAGPSGLGSGTMAAGGGAPMADNNEGADGVGSSSGNWHCDSTWLGDRVITTSTRTWALPTYNNHLYKQISNGTSGGSTNDNTYFGYSTPWGYFDFNRFHCHFSPRDWQRLINNNWGFRPKRLSFKLFNIQVKEVTQNEGTKTIANNLTSTIQVFTDSEYQLPYVLGSAHQGCLPPFPADVFMIPQYGYLTLNNGSQAVGRSSFYCLEYFPSQMLRTGNNFEFSYTFEDVPFHSSYAHSQSLDRLMNPLIDQYLYYLXRTQSTGGTQGTQQLLFSQAGPANMXAQAKNWLPGPCYRQQRVSTTLSQNNNSNFAWTGATKYHLNGRDSLVNPGVAMATHKDDEERFFPSSGVLMFGKQGAGRDNVDYSSVMLTSEEEIKTTNPVATEQYGVVADNLQQTNTGPIVGNVNSQGALPGMVWQNRDVYLQGPIWAKIPHTDGNFHPSPLMGGFGLKHPPPQILIKNTPVPADPPTTFSQAKLASFITQYSTGQVSVEIEWELQKENSKRWNPEIQYTSNYYKSXNVDFAVNTEGTYSEPRPIGTRYLTRNL

SEQ ID NO: 133 - protein, 738 aa, Adeno-associated virus
  MOD_RES (449)..(449): R or S
  MOD_RES (474)..(474): A, R or S
  MOD_RES (711)..(711): T, V, or A
MAADGYLPDWLEDNLSEGIREWWDLKPGAPKPKANQQKQDDGRGLVLPGYKYLGPFNGLDKGEPVNAADAAALEHDKAYDQQLKAGDNPYLRYNHADAEFQERLQEDTSFGGNLGRAVFQAKKRVLEPLGLVEEGAKTAPGKKRPVEPSPQRSPDSSTGIGKKGQQPAKKRLNFGQTGDSESVPDPQPIGEPPAGPSGLGSGTMAAGGGAPMADNNEGADGVGSSSGNWHCDSTWLGDRVITTSTRTWALPTYNNHLYKQISNGTSGGSTNDNTYFGYSTPWGYFDFNRFHCHFSPRDWQRLINNNWGFRPKRLNFKLFNIQVKEVTQNEGTKTIANNLTSTIQVFTDSEYQLPYVLGSAHQGCLPPFPADVFMIPQYGYLTLNNGSQAVGRSSFYCLEYFPSQMLRTGNNFEFSYQFEDVPFHSSYAHSQSLDRLMNPLIDQYLYYLXRTQSTGGTAGTQQLLFSQAGPNNMXAQAKNWLPGPCYRQQRVSTTLSQNNNSNFAWTGATKYHLNGRDSLVNPGVAMATHKDDEERFFPSSGVLMFGKQGAGKDNVDYSSVMLTSEEEIKTTNPVATEQYGVVADNLQQQNAAPIVGAVNSQGALPGMVWQNRDVYLQGPIWAKIPHTDGNFHPSPLMGGFGLKHPPPQILIKNTPVPADPPTTFSQAKLASFITQYSTGQVSVEIEWELQKENSKRWNPEIQYTSNYYKSXNVDFAVNTDGTYSEPRPIGTRYLTRNL

SEQ ID NO: 134 - protein, 736 aa, Adeno-associated virus
  MOD_RES (448)..(448): R or S
  MOD_RES (472)..(472): A, R or S
  MOD_RES (709)..(709): T, V, or A
MAADGYLPDWLEDNLSEGIREWWALKPGAPQPKANQQHQDNARGLVLPGYKYLGPGNGLDKGEPVNAADAAALEHDKAYDQQLKAGDNPYLKYNHADAEFQERLKEDTSFGGNLGRAVFQAKKRLLEPLGLVEEAAKTAPGKKRPVEQSPQEPDSSAGIGKSGAQPAKKRLNFGQTGDTESVPDPQPIGEPPAAPSGVGSLTMASGGGAPVADNNEGADGVGSSSGNWHCDSQWLGDRVITTSTRTWALPTYNNHLYKQISNSTSGGSSNDNAYFGYSTPWGYFDFNRFHCHFSPRDWQRLINNNWGFRPKRLNFKLFNIQVKEVTDNNGVKTIANNLTSTVQVFTDSDYQLPYVLGSAHEGCLPPFPADVFMIPQYGYLTLNDGSQAVGRSSFYCLEYFPSQMLRTGNNFQFSYEFENVPFHSSYAHSQSLDRLMNPLIDQYLYYLXKTINGSGQNQQTLKFSVAGPSNMXVQGRNYIPGPSYRQQRVSTTVTQNNNSEFAWPGASSWALNGRNSLMNPGPAMASHKEGEDRFFPLSGSLIFGKQGTGRDNVDADKVMITNEEEIKTTNPVATESYGQVATNHQSAQAQAQTGWVQNQGILPGMVWQDRDVYLQGPIWAKIPHTDGNFHPSPLMGGFGMKHPPPQILIKNTPVPADPPTAFNKDKLNSFITQYSTGQVSVEIEWELQKENSKRWNPEIQYTSNYYKSXNVEFAVNTEGVYSEPRPIGTRYLTRNL

SEQ ID NO: 135 - protein, 736 aa, Adeno-associated virus
  MOD_RES (448)..(448): R or S
  MOD_RES (472)..(472): A, R or S
  MOD_RES (709)..(709): T, V, or A
MAADGYLPDWLEDNLSEGIREWWALKPGAPQPKANQQHQDNARGLVLPGYKYLGPGNGLDKGEPVNEADAAALEHDKAYDQQLKAGDNPYLKYNHADAEFQERLKEDTSFGGNLGRAVFQAKKRLLEPLGLVEEAAKTAPGKKRPVEQSPQEPDSSVGIGKSGAQPAKKRLNFGQTGDTESVPDPQPIGEPPAAPSGVGSLTMASGGGAPVADNNEGADGVGSSSGNWHCDSQWLGDRVITTSTRTWALPTYNNHLYKQISNSTSGGSSNDNAYFGYSTPWGYFDFNRFHCHFSPRDWQRLINNNWGFRPKRLNFKLFNIQVKEVTDNNGVKTIANNLTSTVQVFTDSDYQLPYVLGSAHEGCLPPFPADVFMIPQYGYLTLNDGSQAVGRSSFYCLEYFPSQMLRTGNNFQFSYEFENVPFHSSYAHSQSLDRLMNPLIDQYLYYLXKTINGSGQNQQTLKFSVAGPSNMXVQGRNYIPGPSYRQQRVSTTVTQNNNSEFAWPGASSWALNGRNSLMNPGPAMASHKEGEDRFFPLSGSLIFGKQGTGRDNVDADKVMITNEEEIKTTNPVATESYGQVATNHQSAQAQAQTGWVQNQGILPGMVWQDRDVYLQGPIWAKIPHTDGNFHPSPLMGGFGMKHPPPQILIKNTPVPADPPTAFNKDKLNSFITQYSTGQVSVEIEWELQKENSKRWNPEIQYTSNYYKSXNVEFAVNTEGVYSEPRPIGTRYLTRNL

SEQ ID NO: 136 - protein, 738 aa, Adeno-associated virus
  MOD_RES (449)..(449): R or S
  MOD_RES (474)..(474): A, R or S
  MOD_RES (711)..(711): T, V, or A
MAADGYLPDWLEDNLSEGIREWWDLKPGAPKPKANQQKQDDGRGLVLPGYKYLGPFNGLDKGEPVNAADAAALEHDKAYDQQLKAGDNPYLRYNHADAEFQERLQEDTSFGGNLGRAVFQAKKRVLEPLGLVEEAAKTAPGKKRPVEPSPQRSPDSSTGIGKKGQQPAKKRLNFGQTGESESVPDPQPIGEPPAGPSGLGSGTMAAGGGAPMADNNEGADGVGSSSGNWHCDSTWLGDRVITTSTRTWALPTYNNHLYKQISNGTSGGSTNDNTYFGYSTPWGYFDFNRFHCHFSPRDWQRLINNNWGFRPKRLSFKLFNIQVKEVTQNEGTKTIANNLTSTIQVFTDSEYQLPYVLGSAHQGCLPPFPADVFMIPQYGYLTLNNGSQAVGRSSFYCLEYFPSQMLRTGNNFEFSYTFEDVPFHSSYAHSQSLDRLMNPLIDQYLYYLXRTQSTGGTQGTQQLLFSQAGPANMXAQAKNWLPGPCYRQQRVSTTLSQNNNSNFAWTGATKYHLNGRDSLVNPGVAMATHKDDEERFFPSSGVLMFGKQGAGRDNVDYSSVMLTSEEEIKTTNPVATEQYGVVADNLQQANTGPIVGNVNSQGALPGMVWQNRDVYLQGPIWAKIPHTDGNFHPSPLMGGFGLKHPPPQILIKNTPVPADPPTTFSQAKLASFITQYSTGQVSVEIEWELQKENSKRWNPEIQYTSNYYKSXNVDFAVNTEGTYSEPRPIGTRYLTRNL

SEQ ID NO: 137 - protein, 724 aa, Adeno-associated virus
  MOD_RES (439)..(439): R or S
  MOD_RES (458)..(458): A, R or S
  MOD_RES (697)..(697): T, V, or A
MSFVDHPPDWLEEVGEGLREFLGLEAGPPKPKPNQQHQDQARGLVLPGYNYLGPGNGLDRGEPVNRADEVAREHDISYNEQLEAGDNPYLKYNHADAEFQEKLADDTSFGGNLGKAVFQAKKRVLEPFGLVEEGAKTAPTGKRIDDHFPKRKKARTEEDSKPSTSSDAEAGPSGSQQLQIPAQPASSLGADTMSAGGGGPLGDNNQGADGVGNASGDWHCDSTWMGDRVVTKSTRTWVLPSYNNHQYREIKSGSVDGSNANAYFGYSTPWGYFDFNRFHSHWSPRDWQRLINNYWGFRPRSLRVKIFNIQVKEVTVQDSTTTIANNLTSTVQVFTDDDYQLPYVVGNGTEGCLPAFPPQVFTLPQYGYATLNRDNTENPTERSSFFCLEYFPSKMLRTGNNFEFTYNFEEVPFHSSFAPSQNLFKLANPLVDQYLYRFXSTNNTGGVQFNKNLAGRYXNTYKNWFPGPMGRTQGWNLGSGVNRASVSAFATTNRMELEGASYQVPPQPNGMTNNLQGSNTYALENTMIFNSQPANPGTTATYLEGNMLITSESETQPVNRVAYNVGGQMATNNQSSTTAPATGTYNLQEIVPGSVWMERDVYLQGPIWAKIPETGAHFHPSPAMGGFGLKHPPPMMLIKNTPVPGNITSFSDVPVSSFITQYSTGQVTVEMEWELKKENSKRWNPEIQYTNNYNDPXFVDFAPDSTGEYRTTRPIGTRYLTRPL

SEQ ID NO: 138 - protein, 736 aa, Adeno-associated virus
  MOD_RES (168)..(168): K or R
  MOD_RES (205)..(205): A or S
  MOD_RES (266)..(266): A or G
  MOD_RES (311)..(311): R or K
  MOD_RES (411)..(411): E or Q
  MOD_RES (460)..(460): T or E
  MOD_RES (493)..(493): A or T
  MOD_RES (562)..(562): S or N
  MOD_RES (576)..(576): Q or E
  MOD_RES (587)..(587): S or A
  MOD_RES (609)..(609): N or D
MAADGYLPDWLEDNLSEGIREWWDLKPGAPKPKANQQKQDDGRGLVLPGYKYLGPFNGLDKGEPVNAADAAALEHDKAYDQQLKAGDNPYLRYNHADAEFQERLQEDTSFGGNLGRAVFQAKKRVLEPLGLVEEGAKTAPGKKRPVEQSPQEPDSSSGIGKKGQQPAXKRLNFGQTGDSESVPDPQPLGEPPAAPSGVGSNTMAXGGGAPMADNNEGADGVGNASGNWHCDSTWLGDRVITTSTRTWALPTYNNHLYKQISSQSGXSTNDNTYFGYSTPWGYFDFNRFHCHFSPRDWQRLINNNWGFRPKXLNFKLFNIQVKEVTTNDGTTTIANNLTSTVQVFTDSEYQLPYVLGSAHQGCLPPFPADVFMIPQYGYLTLNNGSQAVGRSSFYCLEYFPSQMLRTGNNFXFSYTFEDVPFHSSYAHSQSLDRLMNPLIDQYLYYLSRTQTTSGTAGNRXLQFSQAGPSSMANQAKNWLPGPCYRQQRVSKTXNQNNNSNFAWTGATKYHLNGRDSLVNPGPAMATHKDDEDKFFPMSGVLIFGKQGAGNSNVDLDNVMITXEEEIKTTNPVATEXYGTVATNLQSXNTAPATGTVNSQGALPGMVWQXRDVYLQGPIWAKIPHTDGHFHPSPLMGGFGLKHPPPQILIKNTPVPANPPTTFSPAKFASFITQYSTGQVSVEIEWELQKENSKRWNPEIQYTSNYNKSTNVDFAVDTNGVYSEPRPIGTRYLTRNL

SEQ ID NO: 139 - protein, 737 aa, Adeno-associated virus
  MOD_RES (157)..(157): T or S
  MOD_RES (168)..(168): K or R
  MOD_RES (262)..(262): N or S
  MOD_RES (263)..(263): S or H
  MOD_RES (312)..(312): R or K
  MOD_RES (412)..(412): E or Q
  MOD_RES (460)..(460): R or Q
  MOD_RES (461)..(461): T or E
  MOD_RES (552)..(552): D or S
  MOD_RES (556)..(556): L or Y
  MOD_RES (557)..(557): D or S
  MOD_RES (563)..(563): S or N
  MOD_RES (580)..(580): V or I
  MOD_RES (588)..(588): N or S
  MOD_RES (664)..(664): S or T
MAADGYLPDWLEDNLSEGIREWWDLKPGAPKPKANQQKQDDGRGLVLPGYKYLGPFNGLDKGEPVNAADAAALEHDKAYDQQLKAGDNPYLRYNHADAEFQERLQEDTSFGGNLGRAVFQAKKRVLEPLGLVEEGAKTAPGKKRPVEQSPQEPDSSXGIGKKGQQPAXKRLNFGQTGDSESVPDPQPLGEPPAAPSGVGSNTMAAGGGAPMADNNEGADGVGNASGNWHCDSTWLGDRVITTSTRTWALPTYNNHLYKQISXXQSGGSTNDNTYFGYSTPWGYFDFNRFHCHFSPRDWQRLINNNWGFRPKXLNFKLFNIQVKEVTTNDGTTTIANNLTSTVQVFTDSEYQLPYVLGSAHQGCLPPFPADVFMIPQYGYLTLNNGSQAVGRSSFYCLEYFPSQMLRTGNNFXFSYTFEDVPFHSSYAHSQSLDRLMNPLIDQYLYYLSRTQTTGGTAGNXXLQFSQAGPSSMANQAKNWLPGPCYRQQRVSKTTNQNNNSNFAWTGATKYHLNGRDSLVNPGVAMATHKDDEDRFFPSSGVLIFGKQGAGNXNVDXXNVMITXEEEIKTTNPVATEEYGXVATNLQSXNTAPQTGTVNSQGALPGMVWQNRDVYLQGPIWAKIPHTDGNFHPSPLMGGFGLKHPPPQILIKNTPVPANPPTTFXPAKFASFITQYSTGQVSVEIEWELQKENSKRWNPEIQYTSNYNKSTNVDFAVDTEGVYSEPRPIGTRYLTRNL

SEQ ID NO: 140 - protein, 738 aa, Adeno-associated virus
  MOD_RES (158)..(158): T or S
  MOD_RES (169)..(169): K or R
  MOD_RES (564)..(564): S or N
MAADGYLPDWLEDNLSEGIREWWDLKPGAPKPKANQQKQDDGRGLVLPGYKYLGPFNGLDKGEPVNAADAAALEHDKAYDQQLKAGDNPYLRYNHADAEFQERLQEDTSFGGNLGRAVFQAKKRVLEPLGLVEEGAKTAPGKKRPVEQSPQREPDSSXGIGKKGQQPAXKRLNFGQTGDSESVPDPQPLGEPPAAPSGVGSNTMAAGGGAPMADNNEGADGVGNSSGNWHCDSTWLGDRVITTSTRTWALPTYNNHLYKQISNGTSGGSTNDNTYFGYSTPWGYFDFNRFHCHFSPRDWQRLINNNWGFRPKRLNFKLFNIQVKEVTTNEGTKTIANNLTSTVQVFTDSEYQLPYVLGSAHQGCLPPFPADVFMIPQYGYLTLNNGSQAVGRSSFYCLEYFPSQMLRTGNNFQFSYTFEDVPFHSSYAHSQSLDRLMNPLIDQYLYYLSRTQTTGGTAGTQTLQFSQAGPSSMANQAKNWLPGPCYRQQRVSTTTNQNNNSNFAWTGATKYHLNGRDSLVNPGVAMATHKDDEDRFFPSSGVLIFGKQGAGNDNVDYSNVMITXEEEIKTTNPVATEEYGVVATNLQSANTAPQTGTVNSQGALPGMVWQNRDVYLQGPIWAKIPHTDGNFHPSPLMGGFGLKHPPPQILIKNTPVPADPPTTFNQAKLNSFITQYSTGQVSVEIEWELQKENSKRWNPEIQYTSNYYKSTNVDFAVNTEGVYSEPRPIGTRYLTRNL

SEQ ID NO: 141 - protein, 738 aa, Adeno-associated virus
  MOD_RES (158)..(158): T or S
  MOD_RES (169)..(169): R or K
  MOD_RES (315)..(315): N or S
  MOD_RES (413)..(413): Q or E
  MOD_RES (472)..(472): N, T or S
  MOD_RES (534)..(534): D or E
  MOD_RES (542)..(542): I or V
  MOD_RES (595)..(595): I or V
MAADGYLPDWLEDNLSEGIREWWDLKPGAPKPKANQQKQDDGRGLVLPGYKYLGPFNGLDKGEPVNAADAAALEHDKAYDQQLKAGDNPYLRYNHADAEFQERLQEDTSFGGNLGRAVFQAKKRVLEPLGLVEEGAKTAPGKKRPVEQSPQREPDSSXGIGKKGQQPAXKRLNFGQTGDSESVPDPQPLGEPPAAPSGVGSNTMAAGGGAPMADNNEGADGVGSSSGNWHCDSTWLGDRVITTSTRTWALPTYNNHLYKQISNGTSGGSTNDNTYFGYSTPWGYFDFNRFHCHFSPRDWQRLINNNWGFRPKRLXFKLFNIQVKEVTQNEGTKTIANNLTSTIQVFTDSEYQLPYVLGSAHQGCLPPFPADVFMIPQYGYLTLNNGSQAVGRSSFYCLEYFPSQMLRTGNNFXFSYTFEDVPFHSSYAHSQSLDRLMNPLIDQYLYYLSRTQTTGGTAGTQTLQFSQAGPSXMANQAKNWLPGPCYRQQRVSTTTSQNNNSNFAWTGATKYHLNGRDSLVNPGVAMATHKDDEXRFFPSSGXLIFGKQGAGKDNVDYSNVMLTSEEEIKTTNPVATEEYGVVADNLQQQNTAPQXGTVNSQGALPGMVWQNRDVYLQGPIWAKIPHTDGNFHPSPLMGGFGLKHPPPQILIKNTPVPADPPTTFNQAKLNSFITQYSTGQVSVEIEWELQKENSKRWNPEIQYTSNYYKSTNVDFAVNTEGVYSEPRPIGTRYLTRNL

SEQ ID NO: 142 - protein, 738 aa, Adeno-associated virus
  MOD_RES (169)..(169): R or K
  MOD_RES (315)..(315): N or S
  MOD_RES (534)..(534): D or E
  MOD_RES (542)..(542): I or V
MAADGYLPDWLEDNLSEGIREWWDLKPGAPKPKANQQKQDDGRGLVLPGYKYLGPFNGLDKGEPVNAADAAALEHDKAYDQQLKAGDNPYLRYNHADAEFQERLQEDTSFGGNLGRAVFQAKKRVLEPLGLVEEGAKTAPGKKRPVEPSPQRSPDSSTGIGKKGQQPAXKRLNFGQTGDSESVPDPQPIGEPPAAPSGVGSGTMAAGGGAPMADNNEGADGVGSSSGNWHCDSTWLGDRVITTSTRTWALPTYNNHLYKQISNGTSGGSTNDNTYFGYSTPWGYFDFNRFHCHFSPRDWQRLINNNWGFRPKRLXFKLFNIQVKEVTQNEGTKTIANNLTSTIQVFTDSEYQLPYVLGSAHQGCLPPFPADVFMIPQYGYLTLNNGSQAVGRSSFYCLEYFPSQMLRTGNNFEFSYTFEDVPFHSSYAHSQSLDRLMNPLIDQYLYYLSRTQSTGGTAGTQQLLFSQAGPSNMSAQAKNWLPGPCYRQQRVSTTLSQNNNSNFAWTGATKYHLNGRDSLVNPGVAMATHKDDEXRFFPSSGXLMFGKQGAGKDNVDYSNVMLTSEEEIKTTNPVATEQYGVVADNLQQQNTAPIVGAVNSQGALPGMVWQNRDVYLQGPIWAKIPHTDGNFHPSPLMGGFGLKHPPPQILIKNTPVPADPPTTFNQAKLNSFITQYSTGQVSVEIEWELQKENSKRWNPEIQYTSNYYKSTNVDFAVNTEGVYSEPRPIGTRYLTRNL

SEQ ID NO: 143 - protein, 738 aa, Adeno-associated virus
  MOD_RES (471)..(471): S or N
MAADGYLPDWLEDNLSEGIREWWDLKPGAPKPKANQQKQDDGRGLVLPGYKYLGPFNGLDKGEPVNAADAAALEHDKAYDQQLKAGDNPYLRYNHADAEFQERLQEDTSFGGNLGRAVFQAKKRVLEPLGLVEEGAKTAPGKKRPVEPSPQRSPDSSTGIGKKGQQPAKKRLNFGQTGDSESVPDPQPIGEPPAGPSGLGSGTMAAGGGAPMADNNEGADGVGSSSGNWHCDSTWLGDRVITTSTRTWALPTYNNHLYKQISNGTSGGSTNDNTYFGYSTPWGYFDFNRFHCHFSPRDWQRLINNNWGFRPKRLNFKLFNIQVKEVTQNEGTKTIANNLTSTIQVFTDSEYQLPYVLGSAHQGCLPPFPADVFMIPQYGYLTLNNGSQAVGRSSFYCLEYFPSQMLRTGNNFEFSYTFEDVPFHSSYAHSQSLDRLMNPLIDQYLYYLSRTQSTGGTAGTQQLLFSQAGPXNMSAQAKNWLPGPCYRQQRVSTTLSQNNNSNFAWTGATKYHLNGRDSLVNPGVAMATHKDDEERFFPSSGVLMFGKQGAGKDNVDYSSVMLTSEEEIKTTNPVATEQYGVVADNLQQQNTAPIVGAVNSQGALPGMVWQNRDVYLQGPIWAKIPHTDGNFHPSPLMGGFGLKHPPPQILIKNTPVPADPPTTFSQAKLASFITQYSTGQVSVEIEWELQKENSKRWNPEIQYTSNYYKSTNVDFAVNTEGTYSEPRPIGTRYLTRNL

SEQ ID NO: 144 - protein, 737 aa, Adeno-associated virus
  MOD_RES (148)..(148): P or Q
  MOD_RES (169)..(169): K or R
  MOD_RES (314)..(314): R or N
  MOD_RES (466)..(466): Y or H
  MOD_RES (563)..(563): N or S
  MOD_RES (580)..(580): V or I
  MOD_RES (588)..(588): A or S
MAADGYLPDWLEDNLSEGIREWWDLKPGAPKPKANQQKQDDGRGLVLPGYKYLGPFNGLDKGEPVNAADAAALEHDKAYDQQLKAGDNPYLRYNHADAEFQERLQEDTSFGGNLGRAVFQAKKRVLEPLGLVEEGAKTAPGKKRPVEXSPQRSPDSSTGIGKKGQQPAXKRLNFGQTGDSESVPDPQPLGEPPAAPSGVGSGTMAAGGGAPMADNNEGADGVGNASGNWHCDSTWLGDRVITTSTRTWALPTYNNHLYKQISSQSAGSTNDNTYFGYSTPWGYFDFNRFHCHFSPRDWQRLINNNWGFRPKKLXFKLFNIQVKEVTTNDGVTTIANNLTSTVQVFSDSEYQLPYVLGSAHQGCLPPFPADVFMIPQYGYLTLNNGSQSVGRSSFYCLEYFPSQMLRTGNNFEFSYTFEDVPFHSSYAHSQSLDRLMNPLIDQYLYYLARTQSTTGGTAGNRELQFXQAGPSTMAEQAKNWLPGPCYRQQRVSKTLDQNNNSNFAWTGATKYHLNGRNSLVNPGVAMATHKDDEDRFFPSSGVLIFGKTGAANKTTLENVLMTXEEEIKTTNPVATEEYGXVSSNLQSXNTAPQTQTVNSQGALPGMVWQNRDVYLQGPIWAKIPHTDGNFHPSPLMGGFGLKHPPPQILIKNTPVPANPPEVFTPAKFASFITQYSTGQVSVEIEWELQKENSKRWNPEIQYTSNYDKSTNVDFAVDSEGVYSEPRPIGTRYLTRNL

SEQ ID NO: 145 - protein, 735 aa, Adeno-associated virus
  MOD_RES (162)..(162): S or T
  MOD_RES (168)..(168): K or R
  MOD_RES (224)..(224): A or S
  MOD_RES (310)..(310): R or K
  MOD_RES (410)..(410): T or Q
  MOD_RES (446)..(446): S or N
  MOD_RES (461)..(461): Q or L
  MOD_RES (471)..(471): A or S
  MOD_RES (708)..(708): A or T
MAADGYLPDWLEDNLSEGIREWWDLKPGAPKPKANQQKQDDGRGLVLPGYKYLGPFNGLDKGEPVNAADAAALEHDKAYDQQLKAGDNPYLRYNHADAEFQERLQEDTSFGGNLGRAVFQAKKRVLEPLGLVEEGAKTAPGKKRPVEQSPQEPDSSSGIGKXGQQPAXKRLNFGQTGDSESVPDPQPLGEPPAAPSGVGSNTMASGGGAPMADNNEGADGVGNXSGNWHCDSTWLGDRVITTSTRTWALPTYNNHLYKQISSQSGASNDNHYFGYSTPWGYFDFNRFHCHFSPRDWQRLINNNWGFRPKXLNFKLFNIQVKEVTTNDGTTTIANNLTSTVQVFTDSEYQLPYVLGSAHQGCLPPFPADVFMIPQYGYLTLNNGSQAVGRSSFYCLEYFPSQMLRTGNNFXFSYTFEDVPFHSSYAHSQSLDRLMNPLIDQYLYYLXRTQTTSGTAQNRELXFSQAGPSSMXNQAKNWLPGPCYRQQRVSKTANDNNNSNFAWTGATKYHLNGRDSLVNPGPAMASHKDDEDKFFPMSGVLIFGKQGAGASNVDLDNVMITDEEEIKTTNPVATEQYGTVATNLQSSNTAPATGTVNSQGALPGMVWQDRDVYLQGPIWAKIPHTDGHFHPSPLMGGFGLKHPPPQILIKNTPVPANPPTTFSPAKFASFITQYSTGQVSVEIEWELQKENSKRWNPEIQYTSNYNKSXNVDFTVDTNGVYSEPRPIGTRYLTRNL

SEQ ID NO: 146 - protein, 735 aa, Adeno-associated virus
  MOD_RES (42)..(42): G or S
  MOD_RES (168)..(168): R or K
  MOD_RES (310)..(310): K or R
  MOD_RES (410)..(410): T or Q
  MOD_RES (446)..(446): S or R
  MOD_RES (461)..(461): Q or L
  MOD_RES (471)..(471): A or S
  MOD_RES (475)..(475): K or R
  MOD_RES (504)..(504): G or A
  MOD_RES (539)..(539): V or N
MAADGYLPDWLEDNLSEGIREWWDLKPGAPQPKANQQHQDDXRGLVLPGYKYLGPFNGLDKGEPVNEADAAALEHDKAYDQQLKAGDNPYLKYNHADAEFQERLQEDTSFGGNLGRAVFQAKKRVLEPLGLVEEAAKTAPGKKRPVEQSPQEPDSSSGIGKSGQQPAXKRLNFGQTGDSESVPDPQPLGEPPAAPSGVGSNTMASGGGAPMADNNEGADGVGNSSGNWHCDSTWLGDRVITTSTRTWALPTYNNHLYKQISSQSGASNDNHYFGYSTPWGYFDFNRFHCHFSPRDWQRLINNNWGFRPKXLNFKLFNIQVKEVTQNDGTTTIANNLTSTVQVFTDSEYQLPYVLGSAHQGCLPPFPADVFMIPQYGYLTLNNGSQAVGRSSFYCLEYFPSQMLRTGNNFXFSYTFEDVPFHSSYAHSQSLDRLMNPLIDQYLYYLXRTQTTSGTTQQSRLXFSQAGPSSMXQQAXNWLPGPCYRQQRVSKTANDNNNSNFAWTXATKYHLNGRDSLVNPGPAMASHKDDEEKFFPMHGXLIFGKQGTGASNVDLDNVMITDEEEIRTTNPVATEQYGTVATNLQSSNTAPATGTVNSQGALPGMVWQDRDVYLQGPIWAKIPHTDGHFHPSPLMGGFGLKHPPPQILIKNTPVPANPPTTFSPAKFASFITQYSTGQVSVEIEWELQKENSKRWNPEIQYTSNYNKSVNVDFTVDTNGVYSEPRPIGTRYLTRNL

SEQ ID NO: 147 - DNA, 2208 bp, Adeno-associated virus
  modified_base (502)..(504): This region may encompass "aag" or "aaa"
  modified_base (613)..(615): This region may encompass "gca" or "agc"
  modified_base (796)..(798): This region may encompass "gca" or "ggc"
  modified_base (931)..(933): This region may encompass "aga" or "aag"
  modified_base (1231)..(1233): This region may encompass "gag" or "cag"
  modified_base (1378)..(1380): This region may encompass "acg" or "gag"
  modified_base (1477)..(1479): This region may encompass "gcg" or "acc"
  modified_base (1684)..(1686): This region may encompass "agt" or "aac"
  modified_base (1726)..(1728): This region may encompass "cag" or "gag"
  modified_base (1759)..(1761): This region may encompass "tca" or "gcc"
  modified_base (1825)..(1827): This region may encompass "aac" or "gac"
atggctgccgatggttatcttccagattggctcgaggacaacctctctgagggcattcgcgagtggtgggacttgaaacctggagccccgaaacccaaagccaaccagcaaaagcaggacgacggccggggtctggtgcttcctggctacaagtacctcggacccttcaacggactcgacaagggggagcccgtcaacgcggcggacgcagcggccctcgagcacgacaaggcctacgaccagcagctcaaagcgggtgacaatccgtacctgcggtataaccacgccgacgccgagtttcaggagcgtctgcaagaagatacgtcttttgggggcaacctcgggcgagcagtcttccaggccaagaagcgggttctcgaacctctcggtctggttgaggaaggcgctaagacggctcctggaaagaagagaccggtagagcaatcaccccaggaaccagactcctcttcgggcatcggcaagaaaggccagcagcccgcgnnnaagagactcaactttgggcagacaggcgactcagagtcagtgcccgaccctcaaccactcggagaaccccccgcagccccctctggtgtgggatctaatacaatggcannnggcggtggcgctccaatggcagacaataacgaaggcgccgacggagtgggtaacgcctcaggaaattggcattgcgattccacatggctgggcgacagagtcatcaccaccagcacccgaacctgggccctccccacctacaacaaccacctctacaagcaaatctccagccaatcgggannnagcaccaacgacaacacctacttcggctacagcaccccctgggggtattttgactttaacagattccactgccacttctcaccacgtgactggcagcgactcatcaacaacaactggggattccggcccaagnnnctcaacttcaagctcttcaacatccaggtcaaggaggtcacgacgaatgatggcaccacgaccatcgccaataaccttaccagcacggttcaggtctttacggactcggaataccagctcccgtacgtcctcggctctgcgcaccagggctgcctgcctccgttcccggcggacgtcttcatgattcctcagtacgggtacctgactctgaacaatggcagtcaggccgtgggccgttcctccttctactgcctggagtactttccttctcaaatgctgagaacgggcaacaactttnnnttcagctacacgtttgaggacgtgccttttcacagcagctacgcgcacagccaaagcctggaccggctgatgaaccccctcatcgaccagtacctgtactacctgtctcggactcagaccacgagtggtaccgcaggaaatcggnnnttgcaattttctcaggccgggcctagtagcatggcgaatcaggccaaaaactggctacccgggccctgctaccggcagcaacgcgtctccaagacannnaatcaaaataacaacagcaactttgcctggaccggtgccaccaagtatcatctgaatggcagagactctctggtaaatcccggtcccgctatggcaacccacaaggacgacgaagacaaattttttccgatgagcggagtcttaatatttgggaaacagggagctggaaatagcaacgtggaccttgacaacgttatgataaccnnngaggaagaaattaaaaccaccaacccagtggccacagaannntacggcacggtggccactaacctgcaatcgnnnaacaccgctcctgctacagggaccgtcaacagtcaaggagccttacctggcatggtctggcagnnncgggacgtgtacctgcagggtcctatctgggccaagattcctcacacggacggacactttcatccctcgccgctgatgggaggctttggactgaaacacccgcctcctcagatcctgattaagaatacacctgttcccgcgaatcctccaactaccttcagtccagctaagtttgcgtcgttcatcacgcagtacagcaccggacaggtcagcgtggaaattgaatgggagctgcagaaagaaaacagcaaacgctggaacccagagattcaatacacttccaactacaacaaatctacaaatgtggactttgctgttgacacaaatggcgtttattctgagcctcgccccatcggcacccgttacctcacccgtaatctg

SEQ ID NO: 148 - DNA, 2211 bp, Adeno-associated virus
  modified_base (469)..(471): This region may encompass "acg" or "agc"
  modified_base (502)..(504): This region may encompass "aaa" or "aag"
  modified_base (784)..(786): This region may encompass "aac" or "agt"
  modified_base (787)..(789): This region may encompass "agc" or "cac"
  modified_base (934)..(936): This region may encompass "aga" or "aag"
  modified_base (1234)..(1236): This region may encompass "gag" or "cag"
  modified_base (1378)..(1380): This region may encompass "cgg" or "cag"
  modified_base (1381)..(1383): This region may encompass "acg" or "gag"
  modified_base (1654)..(1656): This region may encompass "gac" or "agc"
  modified_base (1666)..(1668): This region may encompass "ctt" or "tac"
  modified_base (1669)..(1671): This region may encompass "gac" or "agc"
  modified_base (1687)..(1689): This region may encompass "agt" or "aac"
  modified_base (1738)..(1740): This region may encompass "gtg" or "atc"
  modified_base (1762)..(1764): This region may encompass "gca" or "agc"
  modified_base (1990)..(1992): This region may encompass "agt" or "acc"
atggctgccgatggttatcttccagattggctcgaggacaacctctctgagggcattcgcgagtggtgggacttgaaacctggagccccgaaacccaaagccaaccagcaaaagcaggacgacggccggggtctggtgcttcctggctacaagtacctcggacccttcaacggactcgacaagggggagcccgtcaacgcggcggacgcagcggccctcgagcacgacaaggcctacgaccagcagctcaaagcgggtgacaatccgtacctgcggtataaccacgccgacgccgagtttcaggagcgtctgcaagaagatacgtcttttgggggcaacctcgggcgagcagtcttccaggccaagaagcgggttctcgaacctctcggtctggttgaggaaggcgctaagacggctcctggaaagaagagaccggtagagcaatcaccccaggaaccagactcctctnnnggcatcggcaagaaaggccagcagcccgcgnnnaagagactcaactttgggcagactggcgactcagagtcagtgcccgaccctcaaccactcggagaaccccccgcagccccctctggtgtgggatctaatacaatggctgcaggcggtggcgctccaatggcagacaataacgaaggcgccgacggagtgggtaatgcctcaggaaattggcattgcgattccacatggctgggcgacagagtcatcaccaccagcacccgaacctgggccctccccacctacaacaaccacctctacaagcaaatctccnnnnnncaatcgggaggaagcaccaacgacaacacctacttcggctacagcaccccctgggggtattttgactttaacagattccactgccacttctcaccacgtgactggcagcgactcatcaacaacaactggggattccggcccaagnnnctcaacttcaagctcttcaacatccaggtcaaggaggtcacgacgaatgatggcaccacgaccatcgccaataaccttaccagcacggttcaggtctttacggactcggaataccagctcccgtacgtcctcggctctgcgcaccagggctgcctgcctccgttcccggcggacgtcttcatgattcctcagtacgggtacctgactctgaacaatggcagtcaggccgtgggccgttcctccttctactgcctggagtactttccttctcaaatgctgagaacgggcaacaactttnnnttcagctacacgtttgaggacgtgccttttcacagcagctacgcgcacagccaaagcctggaccggctgatgaaccccctcatcgaccagtacctgtactacctgtctcggactcagaccacgggaggtaccgcaggaaatnnnnnnttgcaattttctcaggccgggcctagtagcatggcgaatcaggccaaaaactggctacccgggccctgctaccggcagcaacgcgtctccaagacaacgaatcaaaataacaacagcaactttgcctggaccggtgccaccaagtatcatctgaatggcagagactctctggtaaatcccggtgtcgctatggcaacccacaaggacgacgaagaccgattttttccgtccagcggagtcttaatatttgggaaacagggagctggaaatnnnaacgtggacnnnnnnaacgttatgataaccnnngaggaagaaattaaaaccaccaacccagtggccacagaagagtacggcnnngtggccactaacctgcaatcgnnnaacaccgctcctcaaacagggaccgtcaacagtcaaggagccttacctggcatggtctggcagaaccgggacgtgtacctgcagggtcctatctgggccaagattcctcacacggacggaaactttcatccctcgccgctgatgggaggctttggactgaaacacccgcctcctcagatcctgattaagaatacacctgttcccgcgaatcctccaactaccttcnnnccagctaagtttgcgtcgttcatcacgcagtacagcaccggacaggtcagcgtggaaattgaatgggagctgcagaaagaaaacagcaaacgctggaacccagagattcaatacacttccaactacaacaaatctacaaatgtggactttgctgttgacacagaaggcgtttattctgagcctcgccccatcggcacccgttacctcacccgtaatctg

SEQ ID NO: 149 - DNA, 2211 bp, Adeno-associated virus
  modified_base (469)..(471): This region may encompass "tcg" or "acg"
  modified_base (502)..(504): This region may encompass "aaa" or "aga"
  modified_base (1366)..(1368): This region may encompass "gca" or "gga"
  modified_base (1384)..(1386): This region may encompass "caa" or "gca"
  modified_base (1519)..(1521): This region may encompass "acc" or "gcc"
  modified_base (1525)..(1527): This region may encompass "tat" or "ttt"
  modified_base (1528)..(1530): This region may encompass "cac" or "aaa"
  modified_base (1669)..(1671): This region may encompass "caa" or "aac"
  modified_base (1750)..(1752): This region may encompass "aac" or "cac"
  modified_base (1756)..(1758): This region may encompass "tcc" or "gcc"
atggctgccgatggttatcttccagattggctcgaggacaacctctctgagggcattcgcgagtggtgggacttgaaacctggagccccgaaacccaaagccaaccagcaaaagcaggacgacggccggggtctggtgcttcctggctacaagtacctcggacccttcaacggactcgacaagggggagcccgtcaacgcggcggacgcagcggccctcgagcacgacaaagcctacgaccagcagctcaaagcgggtgacaatccgtacctgcggtataatcacgccgacgccgagtttcaggagcgtctgcaagaagatacgtcttttgggggcaacctcgggcgagcagtcttccaggccaagaagcgggttctcgaacctctcggtctggttgaggaaggcgctaagacggctcctggaaagaagaggccggtagagcagtcgccacaagagccagactcctccnnnggcatcggcaagacaggccagcagcccgctnnnaagagactcaattttggtcagactggcgactcagagtcagtccccgacccacaacctctcggagaacctccagcagccccctcaggtgtgggatctaatacaatggcttcaggcggtggcgctccaatggcagacaataacgaaggcgccgacggagtgggtaattcctcgggaaattggcattgcgattccacatggctgggggacagagtcatcaccaccagcacccgaacctgggccctgcccacctacaacaaccacctctacaagcaaatctccaacggcacctcgggaggaagcaccaacgacaacacctattttggctacagcaccccctgggggtattttgacttcaacagattccactgtcacttttcaccacgtgactggcaacgactcatcaacaacaattggggattccggcccaaaagactcaacttcaagctgttcaacatccaggtcaaggaagtcacgacgaacgaaggcaccaagaccatcgccaataatctcaccagcaccgtgcaggtctttacggactcggagtaccagttaccgtacgtgctaggatccgctcaccagggatgtctgcctccgttcccggcggacgtcttcatgattcctcagtacggctatttaactttaaacaatggaagccaagccgtgggacgttcctccttctactgtctggagtatttcccatcgcagatgctgagaaccggcaacaactttcagttcagctacaccttcgaggacgtgcctttccacagcagctacgcgcacagccagagcctggacaggctgatgaatcccctcatcgaccagtacctgtactacctgtccagaacgcaaacgactggaactnnngggacgcagactctgnnnttcagccaagcgggtcctagctcaatggccaaccaggctagaaattgggtgcccggaccttgctaccggcagcagcgcgtctccacgacaaccaaccagaacaacaacagcaactttgcctggacgggagctnnnaagnnnnnnctgaacggccgagactctctaatgaatccgggcgtggcaatggcttcccacaaggatgacgaggaccgcttcttcccttcgagcggggtcctgatttttggcaagcaaggagccgggaacgataatgtggattacagcnnngtgatgattacaaatgaggaagaaatcaagactaccaaccccgtggccacagaagaatatggagcagtggccaccaacnnncagnnngccaatacgcaggcgcagaccggactcgtgcacaaccagggggtgcttcccggcatggtgtggcagaatagagacgtgtacctgcagggtcccatctgggccaaaattcctcacacggacggcaactttcacccgtctcccctgatgggcggctttggactgaagcacccgcctcctcaaattctcatcaagaacacaccggttccagcggacccgccgactaccttcaaccaggccaagctgaactctttcatcacgcagtacagcaccggacaggtcagcgtggaaatcgagtgggagctgcagaaagaaaacagcaaacgctggaatccagagattcaatacacttccaactactacaaatctacaaatgtggactttgctgtcaacacggagggggtttatagcgagcctcgccccattggcacccgttacctcacccgcaacctgtaa

SEQ ID NO: 150 - DNA, 2205 bp, Adeno-associated virus
  modified_base (484)..(486): This region may encompass "tca" or "aca"
  modified_base (502)..(504): This region may encompass "aaa" or "aga"
  modified_base (670)..(672): This region may encompass "gcc" or "tcc"
  modified_base (928)..(930): This region may encompass "aga" or "aaa"
  modified_base (1228)..(1230): This region may encompass "acc" or "cag"
  modified_base (1336)..(1338): This region may encompass "agc" or "aac"
  modified_base (1381)..(1383): This region may encompass "cag" or "ctg"
  modified_base (1411)..(1413): This region may encompass "gct" or "tct"
  modified_base (2122)..(2124): This region may encompass "gcc" or "acc"
atggctgccgatggttatcttccagattggctcgaggacaacctctctgagggcattcgcgagtggtgggacttgaaacctggagccccgaaacccaaagccaaccagcaaaagcaggacgacggccggggtctggtgcttcctggctacaagtacctcggacccttcaacggactcgacaagggggagcccgtcaacgcggcggatgcagcggccctcgagcacgacaaggcctacgaccagcagctcaaagcgggtgacaatccgtacctgcggtataaccacgccgacgccgagtttcaggagcgtctgcaagaagatacgtcttttgggggcaacctcgggcgagcagtcttccaggccaagaagagggttctcgaacctcttggtctggttgaggaaggtgctaagacggctcctggaaagaaacgtccggtagagcagtcgccacaagagccagactcctcctcgggcattggcaagnnnggccagcagcccgctnnnaagagactcaattttggtcagactggcgactcagagtcagtccccgacccacaacctctcggagaacctccagcagccccctctggtgtgggatctaatacaatggcttcaggcggtggcgcaccaatggcagacaataacgaaggcgccgacggagtgggtaatnnntcaggaaattggcattgcgattccacatggctgggcgacagagtcatcaccaccagcacccgaacatgggccttgcccacctataacaaccacctctacaagcaaatctccagtcaatcaggggccagcaacgacaaccactacttcggctacagcaccccctgggggtattttgatttcaacagattccactgccatttctcaccacgtgactggcagcgactcatcaacaacaattggggattccggcccaagnnnctcaacttcaagctcttcaacatccaagtcaaggaggtcacgacgaatgatggcaccacgaccatcgctaataaccttaccagcacggttcaagtcttcacggactcggagtaccagttgccgtacgtcctcggctctgcgcaccagggctgcctccctccgttcccggcggacgtgttcatgattccgcagtacggctacctaacgctcaacaatggcagccaggcagtgggacggtcatccttttactgcctggaatatttcccatcgcagatgctgagaacgggcaataactttnnnttcagctacaccttcgaggacgtgcctttccacagcagctacgcgcacagccagagcctggaccggctgatgaatcctctcatcgaccagtacctgtattacctgnnnagaactcagactacgtccggaactgcccaaaacagggagttgnnntttagccaggcgggtccatctagcatgnnnaatcaggccaaaaactggctacctggaccctgttaccggcagcagcgcgtttctaaaacagcaaatgacaacaacaacagcaactttgcctggactggtgctacaaaatatcaccttaatgggcgtgattctttagtcaaccctggccctgctatggcctcacacaaagacgacgaagacaagttctttcccatgagcggtgtcttgatttttggaaagcagggcgccggagcttcaaacgttgatttggacaatgtcatgatcacagacgaagaggaaatcaaaaccactaaccccgtggccaccgaacaatatgggactgtggcaaccaatctccagagcagcaacacagcccctgcgaccggaactgtgaattctcagggagccttacctggaatggtgtggcaagacagagacgtatacctgcagggtcctatttgggccaaaattcctcacacggatggacactttcacccgtctcctctcatgggcggctttggacttaagcacccgcctcctcagatcctcatcaaaaacacgcctgttcctgcgaatcctccgacaacgttttcgcctgcaaagtttgcttcattcatcacccagtattccacaggacaagtgagcgtggagattgaatgggagctgcagaaagaaaacagcaaacgctggaatcccgaaatacagtatacatctaactataataaatctnnnaacgttgatttcactgtggacaccaatggagtttatagtgagcctcgccccattggcacccgttacctcacccgtaacctg

SEQ ID NO: 151 - DNA, 2205 bp, Adeno-associated virus
  modified_base (124)..(126): This region may encompass "ggt" or "agt"
  modified_base (502)..(504): This region may encompass "aga" or "aaa"
  modified_base (928)..(930): This region may encompass "aaa" or "aga"
  modified_base (1228)..(1230): This region may encompass "aca" or "cag"
  modified_base (1336)..(1338): This region may encompass "agc" or "aga"
  modified_base (1381)..(1383): This region may encompass "caa" or "ctc"
  modified_base (1411)..(1413): This region may encompass "gct" or "tct"
  modified_base (1423)..(1425): This region may encompass "aaa" or "aga"
  modified_base (1510)..(1512): This region may encompass "ggg" or "gcg"
  modified_base (1615)..(1617): This region may encompass "gtt" or "gac"
atggctgctgacggttatcttccagattggctcgaggacaacctttctgaaggcattcgtgagtggtgggatctgaaacctggagcccctcaacccaaagcgaaccaacaacaccaggacgacnnncggggtcttgtgcttccgggttacaaatacctcggaccctttaacggactcgacaaaggagagccggtcaacgaggcggacgcggcagccctcgaacacgacaaagcttacgaccagcagctcaaggccggtgacaacccgtacctcaagtacaaccacgccgacgccgagtttcaggagcgtcttcaagaagatacgtcttttgggggcaaccttggcagagcagtcttccaggccaaaaagagggtccttgagcctcttggtctggttgaggaagcagctaaaacggctcctggaaagaagaggcctgtagaacagtctcctcaggaaccggactcatcatctggtattggcaaatcgggccaacagcctgccnnnaaaagactaaatttcggtcagactggagactcagagtcagtcccagaccctcaacctctcggagaaccaccagcagccccctcaggtgtgggatctaatacaatggcttcaggcggtggcgcaccaatggcagacaataacgagggtgccgatggagtgggtaattcctcaggaaattggcattgcgattccacatggctgggcgacagagtcatcaccaccagcaccagaacctgggccctgcccacttacaacaaccatctctacaagcaaatctccagccaatcaggagcttcaaacgacaaccactactttggctacagcaccccttgggggtattttgactttaacagattccactgccacttctcaccacgtgactggcagcgactcattaacaacaactggggattccggcccaagnnnctcaacttcaagctcttcaacatccaagttaaagaggtcacgcagaacgatggcacgacgactattgccaataaccttaccagcacggttcaagtgtttacggactcggagtatcagctcccgtacgtgctcgggtcggcgcaccaaggctgtctcccgccgtttccagcggacgtcttcatgatccctcagtatggatacctcaccctgaacaacggaagtcaagcggtgggacgctcatccttttactgcctggagtacttcccttcgcagatgctaaggactggaaataacttcnnnttcagctataccttcgaggatgtaccttttcacagcagctacgctcacagccagagtttggatcgcttgatgaatcctcttattgatcagtatctgtactacctgnnnagaacgcaaacaacctctggaacaacccaacaatcacggctgnnntttagccaggctgggccttcgtctatgnnncagcaggccnnnaattggctacctgggccctgctaccggcaacagagagtttcaaagactgctaacgacaacaacaacagtaactttgcttggacannngccaccaaatatcatctcaatggccgcgactcgctggtgaatccaggaccagctatggccagtcacaaggacgatgaagaaaaatttttccctatgcacggcnnnctaatatttggcaaacaagggacaggggcaagtaacgtagatttagataatgtaatgattacggatgaagaagagattcgtaccaccaatcctgtggcaacagagcagtatggaactgtggcaactaacttgcagagctcaaatacagctcccgcgactggaactgtcaatagtcagggggccttacctggcatggtgtggcaagatcgtgacgtgtaccttcaaggacctatctgggcaaagattcctcacacggatggacactttcatccttctcctctgatgggaggctttggactgaaacatccgcctcctcaaatcttgatcaaaaatactccggtaccggcaaatcctccgacgactttcagcccggccaagtttgcttcatttatcactcagtactccactggacaggtcagcgtggaaattgagtgggagctacagaaagaaaacagcaaacgttggaatccagagattcagtacacttccaactacaacaagtctgttaatgtggactttactgtagacactaatggtgtttatagtgaacctcgccctattggaacccggtatctcacacgaaacttg

SEQ ID NO: 152 - DNA, 2208 bp, Adeno-associated virus
atggctgccgatggttatcttccagattggctcgaggacactctctctgaaggaataagacagtggtggaagctcaaacctggcccaccaccaccaaagcccgcagagcggcataaggacgacagcaggggtcttgtgcttcctgggtacaagtacctcggacccttcaacggactcgacaagggagagccggtcaacgaggcagacgccgcggccctcgagcacgacaaagcctacgaccggcagctcgacagcggagacaacccgtacctcaagtacaaccacgccgacgcggagtttcaggagcgccttaaagaagatacgtcttttgggggcaacctcggacgagcagtcttccaggcgaaaaagagggttcttgaacctctgggcctggttgaggaacctgttaagacggctccgggaaaaaagaggccggtagagcactctcctgtggagccagactcctcctcgggaaccggaaaggcgggccagcagcctgcaagaaaaagattgaattttggtcagactggagacgcagactcagtacctgacccccagcctctcggacagccaccagcagccccctctggtctgggaactaatacgatggctacaggcagtggcgcaccaatggcagacaataacgagggcgccgacggagtgggtaattcctcgggaaattggcattgcgattccacatggatgggcgacagagtcatcaccaccagcacccgaacctgggccctgcccacctacaacaaccacctctacaaacaaatttccagccaatcaggagcctcgaacgacaatcactactttggctacagcaccccttgggggtattttgacttcaacagattccactgccacttttcaccacgtgactggcaaagactcatcaacaacaactggggattccgacccaagagactcaacttcaagctctttaacattcaagtcaaagaggtcacgcagaatgacggtacgacgacgattgccaataaccttaccagcacggttcaggtgtttactgactcggagtaccagctcccgtacgtcctcggctcggcgcatcaaggatgcctcccgccgttcccagcagacgtcttcatggtgccacagtatggatacctcaccctgaacaacgggagtcaggcagtaggacgctcttcattttactgcctggagtactttccttctcagatgctgcgtaccggaaacaactttaccttcagctacacttttgaggacgttcctttccacagcagctacgctcacagccagagtctggaccgtctcatgaatcctctcatcgaccagtacctgtattacttgagcagaacaaacactccaagtggaaccaccacgcagtcaaggcttcagttttctcaggccggagcgagtgacattcgggaccagtctaggaactggcttcctggaccctgttaccgccagcagcgagtatcaaagacatctgcggataacaacaacagtgaatactcgtggactggagctaccaagtaccacctcaatggcagagactctctggtgaatccgggcccggccatggcaagccacaaggacgatgaagaaaagttttttcctcagagcggggttctcatctttgggaagcaaggctcagagaaaacaaatgtggacattgaaaaggtcatgattacagacgaagaggaaatcaggacaaccaatcccgtggctacggagcagtatggttctgtatctaccaacctccagagaggcaacagacaagcagctaccgcagatgtcaacacacaaggcgttcttccaggcatggtctggcaggacagagatgtgtaccttcaggggcccatctgggcaaagattccacacacggacggacattttcacccctctcccctcatgggtggattcggacttaaacaccctcctccacagattctcatcaagaacaccccggtacctgcgaatccttcgaccaccttcagtgcggcaaagtttgcttccttcatcacacagtactccacgggacaggtcagcgtggagatcgagtgggagctgcagaaggaaaacagcaaacgctggaatcccgaaattcagtacacttccaactacaacaagtctgttaatgtggactttactgtggacactaatggcgtgtattcagagcctcgccccattggcaccagatacctgactcgtaatctgtaa

SEQ ID NO: 153 - protein, 738 aa, Adeno-associated virus; identical to SEQ ID NO: 9

What is claimed is:

1. A virus comprising a non-naturally occurring, modified AAV VP1 capsid protein, comprising
an amino acid sequence having at least 95% sequence identity to an amino acid sequence of an unmodified AAV VP1 capsid protein when the amino acid sequence of the modified AAV capsid protein and the amino acid sequence of the unmodified AAV VP1 capsid protein are aligned using a basic local alignment search tool (BLAST) program with default algorithm parameters;
wherein the amino acid sequence of the modified VP1 capsid protein differs from the amino acid sequence of the unmodified VP1 capsid protein in at least one amino acid position selected from the group consisting of amino acid positions Q263, S264, G265, A266, S267, N268, H271, N382, G383, S384, Q385, S446, R471, W502, T503, D528, D529, Q589, K706, and V708, which are numbered relative to AAV2 VP1 capsid protein (SEQ ID NO:1) when SEQ ID NO:1 and the amino acid sequence of the unmodified AAV capsid protein are aligned using the basic local alignment search tool (BLAST) program with default algorithm parameters.

2. The virus of claim 1, wherein the amino acid sequence of the modified VP1 capsid protein comprises at least one amino acid residue selected from the group consisting of 446R, 471A, and 708T.

3. The virus of claim 1, wherein the amino acid sequence of the modified VP1 capsid protein comprises at least two amino acid residues selected from the group consisting of 446R, 471A, and 708T.

4. The virus of claim 1, wherein the amino acid sequence of the modified VP1 capsid protein comprises amino acid residues 446R, 471A, and 708T.

5. The virus of claim 1, wherein the amino acid sequence of the modified VP1 capsid protein comprises at least one amino acid residue selected from the group consisting of 446S, 471S, and 708A.

6. The virus of claim 1, wherein the amino acid sequence of the modified VP1 capsid protein comprises at least two amino acid residues selected from the group consisting of 446S, 471S, and 708A.

7. The virus of claim 1, wherein the amino acid sequence of the modified VP1 capsid protein comprises 446S, 471S, and 708A.

8. The virus of any one of claims 1 to 7, wherein the amino acid sequence of the modified VP1 capsid protein differs from the amino acid sequence of the unmodified VP1 capsid protein only in one or more of the amino acid positions Q263, S264, G265, A266, S267, N268, H271, N382, G383, S384, Q385, S446, R471, W502, T503, D528, D529, Q589, K706, and V708, and in no other amino acid positions in the unmodified VP1 capsid protein.

9. The virus of any one of claims 1 to 8, wherein the unmodified VP1 capsid protein is selected from the group consisting of a VP1 capsid protein from AAV1, AAV2, AAV3, AAV6, AAV7, AAV8, AAV9, rh.10, hu.37, LK-03, AAV5, AAV10, Hu68; Anc80; Anc81; Anc82; Anc83; Anc84; Anc94; Anc113; Anc126; Anc127; Anc80L27; Anc80L59; Anc80L60; Anc80L62; Anc80L65; Anc80L33; Anc80L36; Anc80L44; Anc80L1; Anc110; Anc80DI; AAV1 vp1; AAV2 vp1; AAV9vp1; Anc80; Anc126; Anc127; AAV3; AAV7; AAV8; rh10; hu37; and hu.68.

10. The virus of any one of claims 1 to 9, wherein the non-naturally occurring, modified AAV VP1 capsid protein comprises an amino acid sequence having at least 96%, 97%, 98% or 99% sequence identity to the amino acid sequence of the unmodified AAV VP1 capsid protein when the amino acid sequence of the modified AAV capsid protein and the amino acid sequence of the unmodified AAV VP1 capsid protein are aligned using a basic local alignment search tool (BLAST) program with default algorithm parameters.

11. A modified, assembly-competent recombinant AAV (rAAV), comprising:
VP1, VP2, and VP3 capsid proteins, and
a recombinant nucleic acid vector,
wherein the VP1 capsid protein is the modified VP1 capsid protein of any one of claims 1 to 10.

12. A modified, assembly-competent recombinant AAV (rAAV), comprising:
VP1, VP2, and VP3 capsid proteins; and
a recombinant nucleic acid vector,
wherein at least the VP1 capsid protein is a non-naturally occurring, modified VP1 capsid protein comprising an amino acid sequence having at least 95% sequence identity to an amino acid sequence of an unmodified AAV VP1 capsid protein when the amino acid sequence of the modified AAV capsid protein and the amino acid sequence of the unmodified AAV VP1 capsid protein are aligned using a basic local alignment search tool (BLAST) program with default algorithm parameters, and
wherein the modified VP1 capsid protein differs from the unmodified VP1 capsid protein in comprising a means for altering biodistribution of the modified rAAV following administration of the modified rAAV to a first mammalian subject as compared to biodistribution of an unmodified rAAV following administration of the unmodified rAAV having the unmodified VP1 capsid protein to a second mammalian subject of the same type as the first mammalian subject, wherein the unmodified rAAV comprises VP1, VP2, and VP3 capsid proteins having amino acid sequences identical to those of the modified rAAV except for said means.

13. The modified rAAV of claim 11 or claim 12, wherein the modified rAAV achieves higher transduction of liver cells following administration to a first mammalian subject as compared to transduction of liver cells following administration of the unmodified rAAV comprising the unmodified VP1 capsid protein to a second mammalian subject of the same type as the first mammalian subject.

14. The modified rAAV of any one of claims 11 to 13, wherein the modified rAAV exhibits higher expression in liver cells of an expressible polypeptide encoded by the recombinant nucleic acid vector following administration to a first mammalian subject as compared to expression in liver cells of the expressible polypeptide following administration of an unmodified rAAV comprising the unmodified VP1 capsid protein to a second mammalian subject of the same type as the first mammalian subject.

15. The modified rAAV of claim 11 or claim 12, wherein the modified rAAV achieves lower transduction of liver cells following administration to a first mammalian subject as compared to transduction of liver cells following administration of an unmodified rAAV comprising the unmodified VP1 capsid protein to a second mammalian subject of the same type as the first mammalian subject.

16. The modified rAAV of any one of claim 11, 12, or 15, wherein the modified rAAV exhibits lower expression in liver cells of an expressible polypeptide encoded by the recombinant nucleic acid vector following administration to a first mammalian subject as compared to expression in liver cells of the expressible polypeptide following administration of an unmodified rAAV comprising the unmodified VP1 capsid protein to a second mammalian subject of the same type as the first mammalian subject.

17. The modified rAAV of any one of claims 11 to 16, wherein the modified rAAV has an altered interaction with an AAV receptor (AAVR) expressed on liver cells of the first mammalian subject as compared to an unmodified rAAV comprising the unmodified VP1 capsid protein with an AAVR expressed on liver cells of the second mammalian subject.

18. The modified rAAV of claim 17, wherein the modified rAAV has increased interaction with an AAV receptor (AAVR) expressed on liver cells of the first mammalian subject as compared to an unmodified rAAV comprising the unmodified VP1 capsid protein with an AAVR expressed on liver cells of the second mammalian subject.

19. The modified rAAV of claim 17, wherein the modified rAAV has decreased interaction with an AAV receptor (AAVR) expressed on liver cells of the first mammalian subject as compared to an unmodified rAAV comprising the unmodified VP1 capsid protein with an AAVR expressed on liver cells of the second mammalian subject.

20. The modified rAAV of any one of claims 11 to 19, wherein the first and second mammalian subjects are humans or non-human primates (NHP).

21. The modified rAAV of any one of claims 11 to 20, wherein the administration comprises systemic administration, e.g., intravenous infusion.

22. The modified rAAV of any one of claims 11 to 21, wherein the modified rAAV has lower liver toxicity when administered to a mammalian subject, e.g., a human subject, than an unmodified rAAV comprising the unmodified VP1 capsid protein administered in the same amount by the same route of administration.

23. The modified rAAV of any one of claims 11 to 22, wherein means for altering biodistribution of the modified rAAV following administration of the modified rAAV to a first mammalian subject comprises a mutation at one or more amino acid residues at positions selected from the group consisting of Q263, S264, G265, A266, S267, N268, H271, N382, G383, S384, Q385, S446, R471, W502, T503, D528, D529, Q589, K706, and V708, which are numbered relative to an AAV2 VP1 capsid protein (SEQ ID NO:1) when SEQ ID NO:1 and the amino acid sequence of the unmodified AAV capsid protein are aligned using the basic local alignment search tool (BLAST) program with default algorithm parameters.

24. The modified rAAV of claim 23, wherein the modified VP1 capsid protein comprises at least one amino acid residue selected from the group consisting of 446R, 471A, and 708T.

25. The modified rAAV of claim 23, wherein the modified VP1 capsid protein comprises at least two amino acid residues selected from the group consisting of 446R, 471A, and 708T.

26. The modified rAAV of claim 23, wherein the modified VP1 capsid protein comprises amino acid residues 446R, 471A, and 708T.

27. The modified rAAV of claim 23, wherein the modified VP1 capsid protein comprises at least one amino acid residue selected from the group consisting of 446S, 471S, and 708A.

28. The modified rAAV of claim 23, wherein the modified VP1 capsid protein comprises at least two amino acid residues selected from the group consisting of 446S, 471S, and 708A.

29. The modified rAAV of claim 23, wherein the modified VP1 capsid protein comprises amino acid residues 446S, 471S, and 708A.

30. The modified rAAV of any one of claims 23 to 29, wherein the amino acid sequence of the modified VP1 capsid protein differs from the amino acid sequence of the unmodified VP1 capsid protein only in one or more of the amino acid positions Q263, S264, G265, A266, S267, N268, H271, N382, G383, S384, Q385, S446, R471, W502, T503, D528, D529, Q589, K706, and V708, and in no other amino acid positions in the unmodified VP1 capsid protein.

31. The modified rAAV of any one of claims 11 to 30, wherein the unmodified VP1 capsid protein is selected from the group consisting of a VP1 capsid protein from AAV1, AAV2, AAV3, AAV6, AAV7, AAV8, AAV9, rh.10, hu.37, LK-03, AAV5, AAV10, Hu68; Anc80; Anc81; Anc82; Anc83; Anc84; Anc94; Anc113; Anc126; Anc127; Anc80L27; Anc80L59; Anc80L60; Anc80L62; Anc80L65; Anc80L33; Anc80L36; Anc80L44; Anc80L1; Anc110; Anc80DI; AAV1 vp1; AAV2 vp1; AAV9vp1; Anc80; Anc126; Anc127; AAV3; AAV7; AAV8; rh10; hu37; and hu.68.

32. The modified rAAV of any one of claims 11 to 31, wherein the amino acid sequence of the modified VP1 capsid protein is at least 96% identical, 97% identical, 98% identical, or 99% identical to the amino acid sequence of the unmodified VP1 capsid protein.

33. A pharmaceutical composition, comprising:
the modified rAAV of any one of claims 11 to 32, and
a pharmaceutically acceptable carrier.

34. A nucleic acid molecule encoding the modified VP1 capsid protein of any one of claims 1 to 10, or the VP1 protein of the modified rAAV of any one of claims 11 to 32.

35. A vector comprising the nucleic acid molecule of claim 34.

36. An isolated host cell comprising the nucleic acid molecule of claim 34 or the vector of claim 35.

37. A method of altering delivery of an expressible polynucleotide to a target organ of a mammalian subject, e.g., a human patient, as compared to delivery using an rAAV with an unmodified VP1 capsid protein, the method comprising administering a therapeutically effective dose of the modified rAAV of any one of claims 1 to 32 or the pharmaceutical composition of claim 33 to the human patient.

38. The method of claim 37, wherein the expressible nucleic acid is a transgene.

39. The method of claim 37 or claim 38, wherein the modified rAAV exhibits higher transduction of an expressible polypeptide encoded by the recombinant nucleic acid vector into cells of the target organ following administration to a first mammalian subject as compared to transduction into cells of the target organ of the expressible polypeptide following administration of an unmodified rAAV comprising the unmodified VP1 capsid protein to a second corresponding mammalian subject.

40. The method of claim 37 or claim 38, wherein the modified rAAV exhibits lower transduction of an expressible polypeptide encoded by the recombinant nucleic acid vector into cells of the target organ following administration to a first mammalian subject as compared to transduction into cells of the target organ of the expressible polypeptide following administration of an unmodified rAAV comprising the unmodified VP1 capsid protein to a second corresponding mammalian subject.

41. The method of claim 37 or claim 38, wherein the modified rAAV exhibits higher transduction of an expressible polypeptide encoded by the recombinant nucleic acid vector into cells outside of the target organ following administration to a first mammalian subject as compared to transduction into cells outside of the target organ of the expressible polypeptide following administration of an unmodified rAAV comprising the unmodified VP1 capsid protein to a second corresponding mammalian subject.

42. The method of claim 37 or claim 38, wherein the modified rAAV exhibits lower transduction of an expressible polypeptide encoded by the recombinant nucleic acid vector into cells outside of the target organ following administration to a first mammalian subject as compared to transduction into cells outside of the target organ of the expressible polypeptide following administration of an unmodified rAAV comprising the unmodified VP1 capsid protein to a second corresponding mammalian subject.

43. The method of claim 37 or claim 38, wherein the modified rAAV exhibits higher expression of an expressible polypeptide encoded by the recombinant nucleic acid vector in cells in cells of the target organ following administration to a first mammalian subject as compared to expression in cells of the target organ of the expressible polypeptide following administration of an unmodified rAAV comprising the unmodified VP1 capsid protein to a second corresponding mammalian subject.

44. The method of claim 37 or claim 38, wherein the modified rAAV exhibits lower expression of an expressible polypeptide encoded by the recombinant nucleic acid vector in cells of the target organ following administration to a first mammalian subject as compared to expression in cells of the target organ of the expressible polypeptide following administration of an unmodified rAAV comprising the unmodified VP1 capsid protein to a second corresponding mammalian subject.

45. The method of claim 37 or claim 38, wherein the modified rAAV exhibits higher expression in cells outside of the target organ of an expressible polypeptide encoded by the recombinant nucleic acid vector following administration to a first mammalian subject as compared to expression in cells of the target organ of the expressible polypeptide following administration of an unmodified rAAV comprising the unmodified VP1 capsid protein to a second corresponding mammalian subject.

46. The method of claim 37 or claim 38, wherein the modified rAAV exhibits lower expression in cells outside of the target organ of an expressible polypeptide encoded by the recombinant nucleic acid vector following administration to a first mammalian subject as compared to expression in cells of the target organ of the expressible polypeptide following administration of an unmodified rAAV comprising the unmodified VP1 capsid protein to a second corresponding mammalian subject.

47. The method of any one of claims 37 to 46, wherein the target organ is the liver.

48. The method of any one of claims 37 to 47, wherein cells outside the target organ are muscle cells.

49. The method of any one of claims 37 to 47, wherein:
the unmodified AAV is AAV1, AAV8, or AAV9, and the target organ, to which delivery is altered, is the heart;
the unmodified AAV is AAV2, and the target organ, to which delivery is altered, is the kidney;
the unmodified AAV is AAV7, AAV8, AAV9, and the target organ, to which delivery is altered, is the liver;
the unmodified AAV is AAV4, AAV5, AAV6, AAV9, and the target organ, to which delivery is altered, is the lung;
the unmodified AAV is AAV8, and the target organ, to which delivery is altered, is the pancreas;
the unmodified AAV is AAV2, AAV5, AAV8, and the target organ, to which delivery is altered, is the photoreceptor cells of the eye;
the unmodified AAV is AAV1, AAV2, AAV4, AAV5, AAV8, and the target organ, to which delivery is altered, is the Retinal Pigment Epithelium (RPE);
the unmodified AAV is AAV1, AAV6, AAV7, AAV8, AAV9, and the target organ, to which delivery is altered, is the skeletal muscle.

50. The method of any one of claims 37 to 48, wherein the modified rAAV has lower liver toxicity when administered to a mammalian subject, e.g., a human subject, than the same dose of an unmodified rAAV comprising the unmodified VP1 capsid protein administered by the same route of administration.

51. The method of any one of claims 37 to 50, wherein the mammalian subject is a human subject or a non-human primate.

52. A composition for use in the method of any one of claims 37 to 51.
